(19) United States
(12) Patent Application Publication
(10) Pub. No.: US 2026/0193655 A1
(43) Pub. Date: Jul. 9, 2026

(54) RNAi Agents for Inhibiting Expression of Receptor for Advanced Glycation End-products, Compositions Thereof, and Methods of Use

(71) Applicant: Arrowhead Pharmaceuticals, Inc., Pasadena, CA (US)

(72) Inventors: Anthony Nicholas, Oregon, WI (US); Erik W. Bush, Verona, WI (US); David Itiro Kasahara, Madison, WI (US); Casi M. Schienebeck, Deerfield, WI (US)

(21) Appl. No.: 19/394,336

(22) Filed: Nov. 19, 2025

Related U.S. Application Data
(63) Continuation of application No. 17/715,444, filed on Apr. 7, 2022, now Pat. No. 12,486,502.
(60) Provisional application No. 63/172,301, filed on Apr. 8, 2021.
(60) Provisional application No. 63/322,603, filed on Mar. 22, 2022.

(51) Int. Cl. C12N 15/113; A61K 9/00; A61P 11/00

(52) U.S. Cl. CPC C12N 15/113; A61K 9/0073; A61P 11/00; C12N 2310/11; C12N 2310/14

(57) ABSTRACT

Described are RNAi agents, compositions that include RNAi agents, and methods for inhibition of a Receptor for Advanced Glycation End-products (AGER or RAGE) gene. The RAGE RNAi agents and RNAi agent conjugates disclosed herein inhibit the expression of an AGER gene. Pharmaceutical compositions that include one or more RAGE RNAi agents, optionally with one or more additional therapeutics, are also described. Delivery of the described RAGE RNAi agents to pulmonary cells, in vivo, provides for inhibition of AGER gene expression and a reduction in membrane RAGE activity, which can provide a therapeutic benefit to subjects, including human subjects, for the treatment of various diseases including pulmonary inflammation diseases such as severe asthma.

### CROSS REFERENCE TO RELATED APPLICATIONS

[0001] This application is a continuation of U.S. patent application Ser. No. 17/715,444, filed on Apr. 7, 2022, which claims the benefit of priority from U.S. Provisional Patent Application Ser. No. 63/172,301, filed on Apr. 8, 2021, and U.S. Provisional Patent Application Ser. No. 63/322,603, filed on Mar. 22, 2022, the contents of each of which are incorporated herein by reference in their entirety.

### SEQUENCE LISTING

[0002] This application contains a Sequence Listing (in compliance with Standard ST26), which has been submitted in xml format and is hereby incorporated by reference in its entirety. The xml sequence listing file is named 30691-US2_SeqListing.xml, created Nov. 19, 2025, and is 3,666,807 bytes in size.

### FIELD OF THE INVENTION

[0003] The present disclosure relates to RNA interference (RNAi) agents, e.g., double stranded RNAi agents, for inhibition of Receptor for Advanced Glycation End-products (“RAGE” or “AGER”) gene expression, compositions that include RAGE RNAi agents, and methods of use thereof.

### BACKGROUND

[0004] The Receptor for Advanced Glycation End-products (“RAGE” or “AGER”) is a 35 kilodalton transmembrane protein of the immunoglobulin superfamily which functions as a pro-inflammatory pattern recognition receptor. In its full-length, membrane-bound form, the receptor has three functional domains: an extracellular ligand-binding domain, a hydrophobic transmembrane domain, and a cytoplasmic domain that mediates ligand-dependent signal transduction. A second, non-membrane bound soluble form of the receptor (sRAGE) contains only the extracellular ligand-binding domain; formed by proteolytic cleavage of full-length membrane-bound RAGE (or by alternative splicing), sRAGE antagonizes RAGE function since it binds ligands but lacks a cytoplasmic signaling domain.

[0005] RAGE is expressed at constitutively high levels in the lung, primarily localized to type 1 alveolar epithelial cells. Other tissues in the body normally express RAGE at low levels, but expression is upregulated in the presence of RAGE ligands and chronic inflammation. As a pattern recognition receptor, RAGE binds a wide variety of endogenous ligands, including advanced glycation end-products (sugar-modified proteins or lipids), high mobility group box 1 (HMGB1) and S100 proteins. Different intermediate signaling pathways can be activated by different RAGE ligands (e.g. ERK1/2, p38 and JAK/STAT) culminating in the production of reactive oxygen species, sustained activation of NF-κB and the transcription of pro-inflammatory genes (e.g. interleukins, interferon, TNF alpha). Transcription of the gene encoding RAGE itself is promoted by NF-κB, creating a positive feedback loop that perpetuates chronic inflammation.

[0006] RAGE has been linked to the chronic, pathological inflammation that contributes to many diseases, including: pulmonary disease (asthma, acute respiratory distress syndrome, idiopathic pulmonary fibrosis, chronic obstructive pulmonary disease, cystic fibrosis, pneumonia, lung cancer, bronchopulmonary dysplasia), cardiovascular disease (atherosclerosis, myocardial infarction, heart failure, peripheral vascular disease), cancer, diabetes, chronic kidney disease, neurodegenerative disease, rheumatoid arthritis, non-alcoholic steatohepatitis, injury caused by certain viral infections including SARS-CoV-2, certain ocular inflammatory conditions, and skeletal muscle wasting.

[0007] In the pulmonary disease space, RAGE knockout (KO) mice are completely protected, physiologically and histologically, from allergic asthma produced by challenge with house dust mite allergen or ovalbumin. Similarly, RAGE knockout mice are protected from hyperoxia or lipopolysaccharide-induced acute lung injury and inflammation. (See, e.g., Oczypok et al., Paediatr Respir Rev., 23:40-49 (2017); Wang et al., Shock, 50:472-482 (2018)). Genome-wide association studies (GWAS) have linked a variant gain-of-function RAGE allele (G82S) to increased inflammation, decreased pulmonary function, and risk of asthma (see, e.g., Hancock et al., Nat Genet., 42:45-52 (2010); Repapi et al., Nat Genet., 42:36-44 (2010)).

[0008] Despite its potential attractiveness as a drug target, development of potent and selective RAGE inhibitors has proven extremely challenging. Rather than binding to a discrete domain, a wide range of RAGE ligands interact with multiple binding sites within the antibody-like extracellular domain (see, e.g., Rojas et al., Current Drug Targets, 20:340-346 (2019)). While certain RNAi agents capable of inhibiting the expression of a RAGE in vitro have been previously identified and reported in various studies, or are otherwise commercially available, the known RNAi agent constructs are neither sufficiently potent nor sufficiently specific to be viable as a therapeutic drug candidate. Thus, there exists a need for RAGE RNAi agents suitable for use as a therapeutic in the treatment of RAGE-associated diseases and disorders.

### SUMMARY

[0009] There continues to exist a need for novel RNA interference (RNAi) agents (termed RNAi agents, RNAi triggers, or triggers), e.g., double stranded RNAi agents, that are able to selectively and efficiently inhibit the expression of a RAGE (AGER) gene, including for use as a therapeutic or medicament. Further, there exists a need for compositions of novel RAGE-specific RNAi agents for the treatment of diseases or disorders associated with pathological inflammation and/or disorders that can be mediated at least in part by a reduction in AGER gene expression and/or RAGE receptor levels.

[0010] The nucleotide sequences and chemical modifications of the RAGE RNAi agents disclosed herein, as well as their combination with certain specific targeting ligands suitable for selectively and efficiently delivering the RAGE RNAi agents in vivo, differ from those previously disclosed or known in the art. As shown in, for example, the various Examples herein, the disclosed RAGE RNAi agents provide for highly potent and efficient inhibition of the expression of an AGER (RAGE) gene.

[0011] In general, the present disclosure features RAGE gene-specific RNAi agents, compositions that include RAGE RNAi agents, and methods for inhibiting expression of an AGER (RAGE) gene in vitro and/or in vivo using the RAGE RNAi agents and compositions that include RAGE RNAi agents described herein. The RAGE RNAi agents described herein are able to selectively and efficiently decrease or inhibit expression of an AGER gene, and thereby reduce the expression of the RAGE receptor and decrease activation of RAGE receptor signaling, including NF-κB, which ultimately results in reduced inflammation.

[0012] The described RAGE RNAi agents can be used in methods for therapeutic treatment (including preventative or prophylactic treatment) of symptoms and diseases including, but not limited to various pulmonary disease (asthma, acute respiratory distress syndrome, idiopathic pulmonary fibrosis, chronic obstructive pulmonary disease, cystic fibrosis, pneumonia, lung cancer, bronchopulmonary dysplasia), cardiovascular disease (atherosclerosis, myocardial infarction, heart failure, peripheral vascular disease), cancer, diabetes, chronic kidney disease, neurodegenerative disease, rheumatoid arthritis, non-alcoholic steatohepatitis, the inflammatory injury caused by certain viral infections including SARS-CoV-2, certain ocular inflammatory conditions, and skeletal muscle wasting.

[0013] In one aspect, the disclosure features RNAi agents for inhibiting expression of a RAGE (AGER) gene, wherein the RNAi agent includes a sense strand (also referred to as a passenger strand) and an antisense strand (also referred to as a guide strand). The sense strand and the antisense strand can be partially, substantially, or fully complementary to each other. The length of the RNAi agent sense strands described herein each can be 15 to 49 nucleotides in length. The length of the RNAi agent antisense strands described herein each can be 18 to 49 nucleotides in length. In some embodiments, the sense and antisense strands are independently 18 to 26 nucleotides in length. The sense and antisense strands can be either the same length or different lengths. In some embodiments, the sense and antisense strands are independently 21 to 26 nucleotides in length. In some embodiments, the sense and antisense strands are independently 21 to 24 nucleotides in length. In some embodiments, both the sense strand and the antisense strand are 21 nucleotides in length. In some embodiments, the antisense strands are independently 18, 19, 20, 21, 22, 23, 24, 25, 26, 27, 28, 29, or 30 nucleotides in length. In some embodiments, the sense strands are independently 15, 16, 17, 18, 19, 20, 21, 22, 23, 24, 25, 26, 27, 28, 29, 30, 31, 32, 33, 34, 35, 36, 37, 38, 39, 40, 41, 42, 43, 44, 45, 46, 47, 48, or 49 nucleotides in length. The RNAi agents described herein, upon delivery to a cell expressing RAGE such as a pulmonary cell (including, more specifically, type 1 alveolar epithelial cell), inhibit the expression of one or more AGER gene variants in vivo and/or in vitro.

[0014] The RAGE RNAi agents disclosed herein target a human AGER gene (see, e.g., SEQ ID NO: 1). In some embodiments, the RAGE RNAi agents disclosed herein target a portion of an AGER gene having the sequence of any of the sequences disclosed in Table 1.

[0015] In another aspect, the disclosure features compositions, including pharmaceutical compositions, that include one or more of the disclosed RAGE RNAi agents that are able to selectively and efficiently decrease expression of an AGER gene. The compositions that include one or more RAGE RNAi agents described herein can be administered to a subject, such as a human or animal subject, for the treatment (including prophylactic treatment or inhibition) of symptoms and diseases associated with RAGE receptor activity.

[0016] Examples of RAGE RNAi agent sense strands and antisense strands that can be used in a RAGE RNAi agent are provided in Tables 3, 4, 5, and 6. Examples of RAGE RNAi agent duplexes are provided in Tables 7A, 7B, 8, 9A, 9B, and 10. Examples of 19-nucleotide core stretch sequences that may consist of or may be included in the sense strands and antisense strands of certain RAGE RNAi agents disclosed herein, are provided in Table 2.

[0017] In another aspect, the disclosure features methods for delivering RAGE RNAi agents to pulmonary epithelial cells in a subject, such as a mammal, in vivo. Also described herein are compositions for use in such methods. In some embodiments, disclosed herein are methods for delivering RAGE RNAi agents to pulmonary cells (including epithelial cells, macrophages, smooth muscle, endothelial cells, and preferably type 1 alveolar epithelial cells) to a subject in vivo. In some embodiments, the subject is a human subject.

[0018] The methods disclosed herein include the administration of one or more RAGE RNAi agents to a subject, e.g., a human or animal subject, by any suitable means known in the art. The pharmaceutical compositions disclosed herein that include one or more RAGE RNAi agents can be administered in a number of ways depending upon whether local or systemic treatment is desired. Administration can be, but is not limited to, for example, intravenous, intraarterial, subcutaneous, intraperitoneal, subdermal (e.g., via an implanted device), and intraparenchymal administration. In some embodiments, the pharmaceutical compositions described herein are administered by inhalation (such as dry powder inhalation or aerosol inhalation), intranasal administration, intratracheal administration, or oropharyngeal aspiration administration.

[0019] In some embodiments, it is desired that the RAGE RNAi agents described herein inhibit the expression of an AGER gene in the pulmonary epithelium, for which the administration is by inhalation (e.g., by an inhaler device, such as a metered-dose inhaler, or a nebulizer such as a jet or vibrating mesh nebulizer, or a soft mist inhaler).

[0020] The one or more RAGE RNAi agents can be delivered to target cells or tissues using any oligonucleotide delivery technology known in the art. In some embodiments, a RAGE RNAi agent is delivered to cells or tissues by covalently linking the RNAi agent to a targeting group. In some embodiments, the targeting group can include a cell receptor ligand, such as an integrin targeting ligand. Integrins are a family of transmembrane receptors that facilitate cell-extracellular matrix (ECM) adhesion. In particular, integrin alpha-v-beta-6 (αvβ6) is an epithelial-specific integrin that is known to be a receptor for ECM proteins and the TGF-beta latency-associated peptide (LAP), and is expressed in various cells and tissues. Integrin αvβ6 is known to be highly upregulated in injured pulmonary epithelium. In some embodiments, the RAGE RNAi agents described herein are linked to an integrin targeting ligand that has affinity for integrin αvβ6. As referred to herein, an “αvβ6 integrin targeting ligand” is a compound that has affinity for integrin αvβ6, which can be utilized as a ligand to facilitate the targeting and delivery of an RNAi agent to which it is attached to the desired cells and/or tissues (i.e., to cells expressing integrin αvβ6). In some embodiments, multiple αvβ6 integrin targeting ligands or clusters of αvβ6 integrin targeting ligands are linked to a RAGE RNAi agent. In some embodiments, the RAGE RNAi agent-αvβ6 integrin targeting ligand conjugates are selectively internalized by lung epithelial cells, either through receptor-mediated endocytosis or by other means.

[0021] Examples of targeting groups useful for delivering RAGE RNAi agents that include αvβ6 integrin targeting ligands are disclosed, for example, in International Patent Application Publication No. WO 2018/085415 and International Patent Application Publication No. WO 2019/089765, the contents of each of which are incorporated by reference herein in their entirety.

[0022] A targeting group can be linked to the 3′ or 5′ end of a sense strand or an antisense strand of a RAGE RNAi agent. In some embodiments, a targeting group is linked to the 3′ or 5′ end of the sense strand. In some embodiments, a targeting group is linked to the 5′ end of the sense strand. In some embodiments, a targeting group is linked internally to a nucleotide on the sense strand and/or the antisense strand of the RNAi agent. In some embodiments, a targeting group is linked to the RNAi agent via a linker.

[0023] In another aspect, the disclosure features compositions that include one or more RAGE RNAi agents that have the duplex structures disclosed in Tables 7A, 7B, 8, 9A, 9B, and 10.

[0024] The use of RAGE RNAi agents provides methods for therapeutic (including prophylactic) treatment of diseases or disorders for which a reduction in RAGE receptor activity can provide a therapeutic benefit. The RAGE RNAi agents disclosed herein can be used to treat various respiratory diseases, including pulmonary disease (asthma, acute respiratory distress syndrome, idiopathic pulmonary fibrosis, chronic obstructive pulmonary disease, cystic fibrosis, pneumonia, lung cancer, bronchopulmonary dysplasia), cardiovascular disease (atherosclerosis, myocardial infarction, heart failure, peripheral vascular disease), cancer, diabetes, chronic kidney disease, neurodegenerative disease, rheumatoid arthritis, non-alcoholic steatohepatitis, injury caused by certain viral infections including SARS-CoV-2, certain ocular inflammatory conditions, and skeletal muscle wasting. In some embodiments, the RAGE RNAi agents disclosed herein can be used to treat a pulmonary inflammatory disease or condition. RAGE RNAi agents can further be used to treat, for example, various ocular inflammatory diseases and disorders. Such methods of treatment include administration of a RAGE RNAi agent to a human being or animal having elevated or enhanced RAGE receptor levels or RAGE receptor activity beyond desirable levels.

[0025] One aspect described herein is an RNAi agent for inhibiting expression of a receptor for advanced glycation end-products gene, comprising:
[0026] (i) an antisense strand comprising at least 17 contiguous nucleotides differing by 0 or 1 nucleotides from any one of the sequences provided in Table 3;
[0027] (ii) a sense strand comprising a nucleotide sequence that is at least partially complementary to the antisense strand; and
[0028] (iii) one or more targeting ligands.

[0029] In another aspect described is an RNAi agent capable of inhibiting expression of a receptor for advanced glycation end-products gene comprising:
[0030] (i) an antisense strand that is between 18 and 49 nucleotides in length that is at least partially complementary to a receptor for advanced glycation end-products gene (SEQ ID NO:1);
[0031] (ii) a sense strand that is at least partially complementary to the antisense strand; and
[0032] (iii) a targeting ligand linked to the sense strand.

[0033] In some embodiments, a RAGE RNAi agent disclosed herein includes an antisense strand that consists of, consists essentially of, or comprises a nucleobase sequence differing by 0 or 1 nucleobases from the nucleotide sequence (5′→3′) UUGUGUUCAGUUUCCAUUCCG (SEQ ID NO: 7). In some embodiments, a RAGE RNAi agent disclosed herein includes an antisense strand that consists of, consists essentially of, or comprises a nucleotide sequence differing by no more than 1 nucleotide from the nucleotide sequence (5′→3′) UUGUGUUCAGUUUCCAUUCCG (SEQ ID NO: 7), wherein all or substantially all of the nucleotides are modified nucleotides. In some embodiments, a RAGE RNAi agent disclosed herein includes an antisense strand that consists of, consists essentially of, or comprises a nucleobase sequence differing by 0 or 1 nucleobases from the nucleotide sequence (5′→3′) UUGUGUUCAGUUUCCAUUCCG (SEQ ID NO: 7), wherein SEQ ID NO: 7 is located at positions 1-21 (5′→3′) of the antisense strand.

[0034] In some embodiments, a RAGE RNAi agent disclosed herein includes an antisense strand that consists of, consists essentially of, or comprises a modified nucleotide sequence differing by no more than 1 nucleotide from the nucleotide sequence (5′→3′) usUfsgsUfgUfuCfaGfuUfuCfcAfuUfcCfsg (SEQ ID NO: 2), wherein a, c, g, and u represent 2′-O-methyl adenosine, cytidine, guanosine, and uridine, respectively; Af, Cf, Gf, and Uf represent 2′-fluoro adenosine, cytidine, guanosine, and uridine, respectively; and s represents a phosphorothioate linkage, and wherein the sense strand is at least substantially complementary to the antisense strand. As the person of ordinary skill in the art would clearly understand, the inclusion of a phosphorothioate linkage as shown in the modified nucleotide sequences disclosed herein replaces the phosphodiester linkage typically present in oligonucleotides (see, e.g., FIGS. 11A through 11J showing all internucleoside linkages). In some embodiments, a RAGE RNAi agent disclosed herein includes an antisense strand that consists of, consists essentially of, or comprises the nucleotide sequence (5′→3′) usUfsgsUfgUfuCfaGfuUfuCfcAfuUfcCfsg (SEQ ID NO: 2), wherein a, c, g, and u represent 2′-O-methyl adenosine, cytidine, guanosine, and uridine, respectively; Af, Cf, Gf, and Uf represent 2′-fluoro adenosine, cytidine, guanosine, and uridine, respectively; and s represents a phosphorothioate linkage, and wherein the sense strand is at least substantially complementary to the antisense strand.

[0035] In some embodiments, a RAGE RNAi agent disclosed herein includes an antisense strand that consists of, consists essentially of, or comprises a modified nucleotide sequence differing by no more than 1 nucleotide from the nucleotide sequence (5′→3′) cPrpusUfsgsUfgUfuCfaGfuUfuCfcAfuUfcCfsg (SEQ ID NO: 3), wherein a, c, g, and u represent 2′-O-methyl adenosine, cytidine, guanosine, and uridine, respectively; Af, Cf, Gf, and Uf represent 2′-fluoro adenosine, cytidine, guanosine, and uridine, respectively; cPrpu represents a 5′-cyclopropyl phosphonate-2′-O-methyluridine; and s represents a phosphorothioate linkage, and wherein the sense strand is at least substantially complementary to the antisense strand. In some embodiments, a RAGE RNAi agent disclosed herein includes an antisense strand that consists of, consists essentially of, or comprises the nucleotide sequence (5′→3′) cPrpusUfsgsUfgUfuCfaGfuUfuCfcAfuUfcCfsg (SEQ ID NO: 3), wherein a, c, g, and u represent 2′-O-methyl adenosine, cytidine, guanosine, and uridine, respectively; Af, Cf, Gf, and Uf represent 2′-fluoro adenosine, cytidine, guanosine, and uridine, respectively; cPrpu represents a 5′-cyclopropyl phosphonate-2′-O-methyluridine; and s represents a phosphorothioate linkage, and wherein the sense strand is at least substantially complementary to the antisense strand.

[0036] In some embodiments, a RAGE RNAi agent disclosed herein includes an antisense strand that consists of, consists essentially of, or comprises a nucleobase sequence differing by 0 or 1 nucleobases from the nucleotide sequence (5′→3′) UUCCAUUCCUGUUCAUUGCCU (SEQ ID NO: 8). In some embodiments, a RAGE RNAi agent disclosed herein includes an antisense strand that consists of, consists essentially of, or comprises a nucleotide sequence differing by no more than 1 nucleotide from the nucleotide sequence (5′→3′) UUCCAUUCCUGUUCAUUGCCU (SEQ ID NO: 8), wherein all or substantially all of the nucleotides are modified nucleotides. In some embodiments, a RAGE RNAi agent disclosed herein includes an antisense strand that consists of, consists essentially of, or comprises a nucleobase sequence differing by 0 or 1 nucleobases from the nucleotide sequence (5′→3′) UUCCAUUCCUGUUCAUUGCCU (SEQ ID NO: 8), wherein SEQ ID NO: 8 is located at positions 1-21 (5′→3′) of the antisense strand.

[0037] In some embodiments, a RAGE RNAi agent disclosed herein includes an antisense strand that consists of, consists essentially of, or comprises a modified nucleotide sequence differing by no more than 1 nucleotide from the nucleotide sequence (5′→3′) usUfscsCfaUfuCfcUfgUfuCfaUfuGfcCfsu (SEQ ID NO: 4), wherein a, c, g, and u represent 2′-O-methyl adenosine, cytidine, guanosine, and uridine, respectively; Af, Cf, Gf, and Uf represent 2′-fluoro adenosine, cytidine, guanosine, and uridine, respectively; and s represents a phosphorothioate linkage, and wherein the sense strand is at least substantially complementary to the antisense strand. As the person of ordinary skill in the art would clearly understand, the inclusion of a phosphorothioate linkage as shown in the modified nucleotide sequences disclosed herein replaces the phosphodiester linkage typically present in oligonucleotides (see, e.g., FIGS. 11A through 11J showing all internucleoside linkages). In some embodiments, a RAGE RNAi agent disclosed herein includes an antisense strand that consists of, consists essentially of, or comprises the nucleotide sequence (5′→3′) usUfscsCfaUfuCfcUfgUfuCfaUfuGfcCfsu (SEQ ID NO: 4), wherein a, c, g, and u represent 2′-O-methyl adenosine, cytidine, guanosine, and uridine, respectively; Af, Cf, Gf, and Uf represent 2′-fluoro adenosine, cytidine, guanosine, and uridine, respectively; and s represents a phosphorothioate linkage, and wherein the sense strand is at least substantially complementary to the antisense strand.

[0038] In some embodiments, a RAGE RNAi agent disclosed herein includes an antisense strand that consists of, consists essentially of, or comprises a nucleobase sequence differing by 0 or 1 nucleobases from the nucleotide sequence (5′ 3′) UGAUGUUUUGAGCACCUACUC (SEQ ID NO: 9). In some embodiments, a RAGE RNAi agent disclosed herein includes an antisense strand that consists of, consists essentially of, or comprises a nucleotide sequence differing by no more than 1 nucleotide from the nucleotide sequence (5′→3′) UGAUGUUUUGAGCACCUACUC (SEQ ID NO: 9), wherein all or substantially all of the nucleotides are modified nucleotides. In some embodiments, a RAGE RNAi agent disclosed herein includes an antisense strand that consists of, consists essentially of, or comprises a nucleobase sequence differing by 0 or 1 nucleobases from the nucleotide sequence (5′→3′) UGAUGUUUUGAGCACCUACUC (SEQ ID NO: 9), wherein SEQ ID NO: 7 is located at positions 1-21 (5′→3′) of the antisense strand.

[0039] In some embodiments, a RAGE RNAi agent disclosed herein includes an antisense strand that consists of, consists essentially of, or comprises a modified nucleotide sequence differing by no more than 1 nucleotide from the nucleotide sequence (5′→3′) usGfsasuguuuugaGfcAfcCfuacusc (SEQ ID NO: 5), wherein a, c, g, and u represent 2′-O-methyl adenosine, cytidine, guanosine, and uridine, respectively; Af, Cf, Gf, and Uf represent 2′-fluoro adenosine, cytidine, guanosine, and uridine, respectively; and s represents a phosphorothioate linkage, and wherein the sense strand is at least substantially complementary to the antisense strand. As the person of ordinary skill in the art would clearly understand, the inclusion of a phosphorothioate linkage as shown in the modified nucleotide sequences disclosed herein replaces the phosphodiester linkage typically present in oligonucleotides (see, e.g., FIGS. 11A through 11J showing all internucleoside linkages). In some embodiments, a RAGE RNAi agent disclosed herein includes an antisense strand that consists of, consists essentially of, or comprises the nucleotide sequence (5′ 3′) usGfsasuguuuugaGfcAfcCfuacusc (SEQ ID NO: 5), wherein a, c, g, and u represent 2′-O-methyl adenosine, cytidine, guanosine, and uridine, respectively; Af, Cf, Gf, and Uf represent 2′-fluoro adenosine, cytidine, guanosine, and uridine, respectively; and s represents a phosphorothioate linkage, and wherein the sense strand is at least substantially complementary to the antisense strand.

[0040] In some embodiments, a RAGE RNAi agent disclosed herein includes an antisense strand that consists of, consists essentially of, or comprises a modified nucleotide sequence differing by no more than 1 nucleotide from the nucleotide sequence (5′→3′) cPrpusGfsasuguuuugaGfcAfcCfuacusc (SEQ ID NO: 6), wherein a, c, g, and u represent 2′-O-methyl adenosine, cytidine, guanosine, and uridine, respectively; Af, Cf, Gf, and Uf represent 2′-fluoro adenosine, cytidine, guanosine, and uridine, respectively; cPrpu represents a 5′-cyclopropyl phosphonate-2′-O-methyluridine; and s represents a phosphorothioate linkage, and wherein the sense strand is at least substantially complementary to the antisense strand. In some embodiments, a RAGE RNAi agent disclosed herein includes an antisense strand that consists of, consists essentially of, or comprises the nucleotide sequence (5′→3′) cPrpusGfsasuguuuugaGfcAfcCfuacusc (SEQ ID NO: 6), wherein a, c, g, and u represent 2′-O-methyl adenosine, cytidine, guanosine, and uridine, respectively; Af, Cf, Gf, and Uf represent 2′-fluoro adenosine, cytidine, guanosine, and uridine, respectively; cPrpu represents a 5′-cyclopropyl phosphonate-2′-O-methyluridine; and s represents a phosphorothioate linkage, and wherein the sense strand is at least substantially complementary to the antisense strand.

[0041] In some embodiments, a RAGE RNAi agent disclosed herein includes an antisense strand that consists of, consists essentially of, or comprises a nucleotide sequence that differs by 0 or 1 nucleotides from one of the following nucleotide sequences (5′→3′):

(SEQ ID NO: 7)
UUGUGUUCAGUUUCCAUUCCG;
(SEQ ID NO: 8)
UUCCAUUCCUGUUCAUUGCCU;
or
(SEQ ID NO: 9)
UGAUGUUUUGAGCACCUACUC;

[0042] wherein the RAGE RNAi agent further includes a sense strand that is at least partially complementary to the antisense strand; and wherein all or substantially all of the nucleotides on both the antisense strand and the sense strand are modified nucleotides.

[0043] In some embodiments, a RAGE RNAi agent disclosed herein includes an antisense strand that consists of, consists essentially of, or comprises a nucleotide sequence that differs by 0 or 1 nucleotides from one of the following nucleotide sequences (5′→3′):

(SEQ ID NO: 7)
UUGUGUUCAGUUUCCAUUCCG;
(SEQ ID NO: 8)
UUCCAUUCCUGUUCAUUGCCU;
or
(SEQ ID NO: 9)
UGAUGUUUUGAGCACCUACUC;

wherein the RAGE RNAi agent further includes a sense strand that is at least partially complementary to the antisense strand; wherein all or substantially all of the nucleotides on both the antisense strand and the sense strand are modified nucleotides; and wherein the sense strand further includes inverted abasic residues at the 3′ terminal end and at the 5′ end of the nucleotide sequence, and the sense strand also includes a targeting ligand that is covalently linked to the 5′ terminal end, wherein the targeting ligand includes a compound having affinity for an integrin receptor.

[0044] In some embodiments, a RAGE RNAi agent disclosed herein includes an antisense strand that consists of, consists essentially of, or comprises a nucleotide sequence that differs by 0 or 1 nucleotides from one of the following nucleotide sequences (5′→3′):

(SEQ ID NO: 7)
UUGUGUUCAGUUUCCAUUCCG;
(SEQ ID NO: 8)
UUCCAUUCCUGUUCAUUGCCU;
or
(SEQ ID NO: 9)
UGAUGUUUUGAGCACCUACUC;

wherein the RAGE RNAi agent further includes a sense strand that is at least partially complementary to the antisense strand; wherein all or substantially all of the nucleotides on both the antisense strand and the sense strand are modified nucleotides; and wherein the sense strand further includes inverted abasic residues at the 3′ terminal end and at the 5′ end of the nucleotide sequence, and the sense strand also includes a targeting ligand that is covalently linked to the 5′ terminal end, wherein the targeting ligand includes a compound having affinity for an integrin receptor; and wherein the respective antisense strand sequence is located at positions 1-21 of the antisense strand.

[0045] In some embodiments, a RAGE RNAi agent disclosed herein includes an antisense strand and a sense strand, wherein the antisense strand and the sense strand consist of, consist essentially of, or comprise nucleotide sequences that differ by 0 or 1 nucleotides from one of the following nucleotide sequence (5′→3′) pairs:

(SEQ ID NO: 7)
UUGUGUUCAGUUUCCAUUCCG
and
(SEQ ID NO: 19)
CGGAAUGGAAACUGAACACAA;
(SEQ ID NO: 8)
UUCCAUUCCUGUUCAUUGCCU
and
(SEQ ID NO: 21)
AGGCAAUGAACAGGAAUIGAA;
or
(SEQ ID NO: 9)
UGAUGUUUUGAGCACCUACUC
and
(SEQ ID NO: 20)
GAGUAGGUGCUCAAAACAUCA;

wherein all or substantially all of the nucleotides on both the antisense strand and the sense strand are modified nucleotides.

[0046] In some embodiments, a RAGE RNAi agent disclosed herein includes an antisense strand and a sense strand, wherein the antisense strand and the sense strand consist of, consist essentially of, or comprise nucleotide sequences that differ by 0 or 1 nucleotides from one of the following nucleotide sequences (5′→3′) pairs:

(SEQ ID NO: 7)
UUGUGUUCAGUUUCCAUUCCG
and
(SEQ ID NO: 19)
CGGAAUGGAAACUGAACACAA;
(SEQ ID NO: 8)
UUCCAUUCCUGUUCAUUGCCU
and
(SEQ ID NO: 21)
AGGCAAUGAACAGGAAUIGAA;
or
(SEQ ID NO: 9)
UGAUGUUUUGAGCACCUACUC
and
(SEQ ID NO: 20)
GAGUAGGUGCUCAAAACAUCA;

wherein all or substantially all of the nucleotides on both the antisense strand and the sense strand are modified nucleotides; and wherein the sense strand further includes inverted abasic residues at the 3′ terminal end and at the 5′ end of the nucleotide sequence, and the sense strand also includes a targeting ligand that is covalently linked to the 5′ terminal end, wherein the targeting ligand includes a compound with affinity for an integrin receptor.

[0047] In some embodiments, a RAGE RNAi agent disclosed herein includes an antisense strand that consists of, consists essentially of, or comprises a modified nucleotide sequence that differs by 0 or 1 nucleotides from one of the following nucleotide sequences (5′→3′):

(SEQ ID NO: 2)
usUfsgsUfgUfuCfaGfuUfuCfcAfuUfcCfsg;
(SEQ ID NO: 3)
cPrpusUfsgsUfgUfuCfaGfuUfuCfcAfuUfcCfsg;
(SEQ ID NO: 5)
usGfsasuguuuugaGfcAfcCfuacusc;
(SEQ ID NO: 6)
cPrpusGfsasuguuuugaGfcAfcCfuacusc;
(SEQ ID NO: 4)
usUfscsCfaUfuCfcUfgUfuCfaUfuGfcCfsu;

wherein a, c, g, and u represent 2′-O-methyl adenosine, cytidine, guanosine, and uridine, respectively; Af, Cf, Gf, and Uf represent 2′-fluoro adenosine, cytidine, guanosine, and uridine, respectively; cPrpu represents a 5′-cyclopropyl phosphonate-2′-O-methyluridine; s represents a phosphorothioate linkage; and wherein the RAGE RNAi agent further includes the sense strand that is at least partially complementary to the antisense strand; and wherein all or substantially all of the nucleotides of the sense strand are modified nucleotides.

[0048] In some embodiments, a RAGE RNAi agent disclosed herein includes an antisense strand that consists of, consists essentially of, or comprises a modified nucleotide sequence that differs by 0 or 1 nucleotides from one of the following nucleotide sequences (5′→3′):

(SEQ ID NO: 2)
usUfsgsUfgUfuCfaGfuUfuCfcAfuUfcCfsg;
(SEQ ID NO: 3)
cPrpusUfsgsUfgUfuCfaGfuUfuCfcAfuUfcCfsg;
(SEQ ID NO: 5)
usGfsasuguuuugaGfcAfcCfuacusc;
(SEQ ID NO: 6)
cPrpusGfsasuguuuugaGfcAfcCfuacusc;
(SEQ ID NO: 4)
usUfscsCfaUfuCfcUfgUfuCfaUfuGfcCfsu;

wherein the RAGE RNAi agent further includes the sense strand that is at least partially complementary to the antisense strand; wherein all or substantially all of the nucleotides of the sense strand are modified nucleotides; wherein all or substantially all of the nucleotides on both the antisense strand and the sense strand are modified nucleotides; and wherein the sense strand further includes inverted abasic residues at the 3′ terminal end and at the 5′ end of the nucleotide sequence, and the sense strand also includes a targeting ligand that is covalently linked to the 5′ terminal end, wherein the targeting ligand includes a compound with affinity for an integrin receptor.

[0049] In some embodiments, a RAGE RNAi agent disclosed herein includes an antisense strand and a sense strand that consists of, consists essentially of, or comprises one of the following nucleotide sequence pairs (5′→3′):

(SEQ ID NO: 2)
usUfsgsUfgUfuCfaGfuUfuCfcAfuUfcCfsg
and
(SEQ ID NO: 13)
csggaauggAfAfAfcugaacacaa;
(SEQ ID NO: 3)
cPrpusUfsgsUfgUfuCfaGfuUfuCfcAfuUfcCfsg
and
(SEQ ID NO: 13)
csggaauggAfAfAfcugaacacaa;
(SEQ ID NO: 5)
usGfsasuguuuugaGfcAfcCfuacusc
and
(SEQ ID NO: 14)
gsaguagGfuGfcUfcaaaacauca;
(SEQ ID NO: 6)
cPrpusGfsasuguuuugaGfcAfcCfuacusc
and
(SEQ ID NO: 14)
gsaguagGfuGfcUfcaaaacauca;
and
(SEQ ID NO: 4)
usUfscsCfaUfuCfcUfgUfuCfaUfuGfcCfsu
and
(SEQ ID NO: 15)
asggcaaugAfAfCfaggaauigaa;

wherein a, c, g, i, and u represent 2′-O-methyl adenosine, cytidine, guanosine, inosine, and uridine, respectively; Af, Cf, Gf, and Uf represent 2′-fluoro adenosine, cytidine, guanosine, and uridine, respectively; cPrpu represents a 5′-cyclopropyl phosphonate-2′-O-methyluridine; Tri-SM6.1-αvβ6-(TA14) represents the tridentate αvβ6 epithelial cell targeting ligand with the chemical structure as shown in FIG. 1; and s represents a phosphorothioate linkage; and wherein the sense strand also includes a targeting ligand having affinity for an integrin receptor, wherein the targeting ligand is optionally linked at the 5′-end of the sense strand.

[0050] In some embodiments, a RAGE RNAi agent disclosed herein includes an antisense strand and a sense strand that consists of, consists essentially of, or comprises modified nucleotide sequences that differs by 0 or 1 nucleotides from one of the following sequence pairs (5′→3′):

(SEQ ID NO: 2)
usUfsgsUfgUfuCfaGfuUfuCfcAfuUfcCfsg
and
(SEQ ID NO: 10)
Tri-SM6.1-αvβ6-(TA14)csggaauggAf
AfAfcugaacacaas(invAb);
(SEQ ID NO: 3)
cPrpusUfsgsUfgUfuCfaGfuUfuCfcAfuUfcCfsg
and
(SEQ ID NO: 10)
Tri-SM6.1-αvβ6-(TA14)csggaauggAfAfAf
cugaacacaas(invAb);
(SEQ ID NO: 5)
usGfsasuguuuugaGfcAfcCfuacusc
and
(SEQ ID NO: 11)
Tri-SM6.1-αvβ6-(TA14)gsaguagGfuG
fcUfcaaaacaucas(invAb);
(SEQ ID NO: 6)
cPrpusGfsasuguuuugaGfcAfcCfuacusc
and
(SEQ ID NO: 11)
Tri-SM6.1-αvβ6-(TA14)gsaguagGfuGf
cUfcaaaacaucas(invAb);
and
(SEQ ID NO: 4)
usUfscsCfaUfuCfcUfgUfuCfaUfuGfcCfsu
and
(SEQ ID NO: 12)
Tri-SM6.1-αvβ6-(TA14)asggcaaugAfAfC
faggaauigaas(invAb);

wherein a, c, g, i, and u represent 2′-O-methyl adenosine, cytidine, guanosine, inosine, and uridine, respectively; Af, Cf, Gf, and Uf represent 2′-fluoro adenosine, cytidine, guanosine, and uridine, respectively; cPrpu represents a 5′-cyclopropyl phosphonate-2′-O-methyluridine; Tri-SM6.1-αvβ6-(TA14) represents the tridentate αvβ6 epithelial cell targeting ligand with the chemical structure as shown in FIG. 1; (invAb) represents an inverted abasic deoxyribonucleotide (see also Table 11), and s represents a phosphorothioate linkage.

[0051] In some embodiments, a RAGE RNAi agent disclosed herein includes an antisense strand that includes a nucleobase sequence that differs by 0 or 1 nucleobases from the nucleotide sequences selected from the group consisting of (5′→3′):

(SEQ ID NO: 55)
UUGUGUUCAGUUUCCAUUC;
(SEQ ID NO: 69)
UUCCAUUCCUGUUCAUUGC;
and
(SEQ ID NO: 65)
UGAUGUUUUGAGCACCUAC.

[0052] In some embodiments, a RAGE RNAi agent disclosed herein includes an antisense strand that includes a nucleobase sequence that differs by 0 or 1 nucleobases from the nucleotide sequences selected from the group consisting of (5′→3′):

(SEQ ID NO: 55)
UUGUGUUCAGUUUCCAUUC;
(SEQ ID NO: 69)
UUCCAUUCCUGUUCAUUGC;
and
(SEQ ID NO: 65)
UGAUGUUUUGAGCACCUAC.

wherein all or substantially all of the nucleotides are modified nucleotides.

[0053] In some embodiments, a RAGE RNAi agent disclosed herein includes an antisense strand that includes a nucleobase sequence that differs by 0 or 1 nucleobases from the nucleotide sequences selected from the group consisting of (5′→3′):

(SEQ ID NO: 55)
UUGUGUUCAGUUUCCAUUC;
(SEQ ID NO: 69)
UUCCAUUCCUGUUCAUUGC;
and
(SEQ ID NO: 65)
UGAUGUUUUGAGCACCUAC.

wherein all or substantially all of the nucleotides are modified nucleotides, and wherein SEQ ID NO: 55, SEQ ID NO: 69 and SEQ ID NO: 65, respectively, is located at nucleotide positions 1-19 (5′→3′) of the antisense strand.

[0054] In some embodiments, a RAGE RNAi agent disclosed herein includes an antisense strand and a sense strand that each include a nucleobase sequences that differs by 0 or 1 nucleobases from the nucleotide sequence pairs selected from the group consisting of (5′→3′):

(SEQ ID NO: 55)
UUGUGUUCAGUUUCCAUUC
and
(SEQ ID NO: 298)
GAAUGGAAACUGAACACAA;
(SEQ ID NO: 69)
UUCCAUUCCUGUUCAUUGC;
and
(SEQ ID NO: 316)
GCAAUGAACAGGAAUIGAA;
or
(SEQ ID NO: 65)
UGAUGUUUUGAGCACCUAC
and
(SEQ ID NO: 308)
GUAGGUGCUCAAAACAUCA.

[0055] In some embodiments, a RAGE RNAi agent disclosed herein includes an antisense strand and a sense strand that each include a nucleobase sequences that differs by 0 or 1 nucleobases from the nucleotide sequence pairs selected from the group consisting of (5′→3′):

(SEQ ID NO: 55)
UUGUGUUCAGUUUCCAUUC
and
(SEQ ID NO: 298)
GAAUGGAAACUGAACACAA;
(SEQ ID NO: 69)
UUCCAUUCCUGUUCAUUGC;
and
(SEQ ID NO: 316)
GCAAUGAACAGGAAUIGAA;
or
(SEQ ID NO: 65)
UGAUGUUUUGAGCACCUAC
and
(SEQ ID NO: 308)
GUAGGUGCUCAAAACAUCA

### Definitions

[0056] As used herein, the terms “oligonucleotide” and “polynucleotide” mean a polymer of linked nucleosides each of which can be independently modified or unmodified.

[0057] As used herein, an “RNAi agent” (also referred to as an “RNAi trigger”) means a composition that contains an RNA or RNA-like (e.g., chemically modified RNA) oligonucleotide molecule that is capable of degrading or inhibiting (e.g., degrades or inhibits under appropriate conditions) translation of messenger RNA (mRNA) transcripts of a target gene in a sequence specific manner. As used herein, RNAi agents may operate through the RNA interference mechanism (i.e., inducing RNA interference through interaction with the RNA interference pathway machinery (RNA-induced silencing complex or RISC) of mammalian cells), or by any alternative mechanism(s) or pathway(s). While it is believed that RNAi agents, as that term is used herein, operate primarily through the RNA interference mechanism, the disclosed RNAi agents are not bound by or limited to any particular pathway or mechanism of action. RNAi agents disclosed herein are comprised of a sense strand and an antisense strand, and include, but are not limited to: short (or small) interfering RNAs (siRNAs), double stranded RNAs (dsRNA), micro RNAs (miRNAs), short hairpin RNAs (shRNA), and dicer substrates. The antisense strand of the RNAi agents described herein is at least partially complementary to the mRNA being targeted (i.e., AGER mRNA). RNAi agents can include one or more modified nucleotides and/or one or more non-phosphodiester linkages.

[0058] As used herein, the terms “silence,” “reduce,” “inhibit,” “down-regulate,” or “knockdown” when referring to expression of a given gene, mean that the expression of the gene, as measured by the level of RNA transcribed from the gene or the level of polypeptide, protein, or protein subunit translated from the mRNA in a cell, group of cells, tissue, organ, or subject in which the gene is transcribed, is reduced when the cell, group of cells, tissue, organ, or subject is treated with the RNAi agents described herein as compared to a second cell, group of cells, tissue, organ, or subject that has not or have not been so treated.

[0059] As used herein, the terms “sequence” and “nucleotide sequence” mean a succession or order of nucleobases or nucleotides, described with a succession of letters using standard nomenclature.

[0060] As used herein, a “base,” “nucleotide base,” or “nucleobase,” is a heterocyclic pyrimidine or purine compound that is a component of a nucleotide, and includes the primary purine bases adenine and guanine, and the primary pyrimidine bases cytosine, thymine, and uracil. A nucleobase may further be modified to include, without limitation, universal bases, hydrophobic bases, promiscuous bases, size-expanded bases, and fluorinated bases. (See, e.g., Modified Nucleosides in Biochemistry, Biotechnology and Medicine, Herdewijn, P. ed. Wiley-VCH, 2008). The synthesis of such modified nucleobases (including phosphoramidite compounds that include modified nucleobases) is known in the art.

[0061] As used herein, and unless otherwise indicated, the term “complementary,” when used to describe a first nucleobase or nucleotide sequence (e.g., RNAi agent sense strand or targeted mRNA) in relation to a second nucleobase or nucleotide sequence (e.g., RNAi agent antisense strand or a single-stranded antisense oligonucleotide), means the ability of an oligonucleotide or polynucleotide including the first nucleotide sequence to hybridize (form base pair hydrogen bonds under mammalian physiological conditions (or otherwise suitable in vivo or in vitro conditions)) and form a duplex or double helical structure under certain standard conditions with an oligonucleotide that includes the second nucleotide sequence. The person of ordinary skill in the art would be able to select the set of conditions most appropriate for a hybridization test. Complementary sequences include Watson-Crick base pairs or non-Watson-Crick base pairs and include natural or modified nucleotides or nucleotide mimics, at least to the extent that the above hybridization requirements are fulfilled. Sequence identity or complementarity is independent of modification. For example, a and Af, as defined herein, are complementary to U (or T) and identical to A for the purposes of determining identity or complementarity.

[0062] As used herein, “perfectly complementary” or “fully complementary” means that in a hybridized pair of nucleobase or nucleotide sequence molecules, all (100%) of the bases in a contiguous sequence of a first oligonucleotide will hybridize with the same number of bases in a contiguous sequence of a second oligonucleotide. The contiguous sequence may comprise all or a part of a first or second nucleotide sequence.

[0063] As used herein, “partially complementary” means that in a hybridized pair of nucleobase or nucleotide sequence molecules, at least 70%, but not all, of the bases in a contiguous sequence of a first oligonucleotide will hybridize with the same number of bases in a contiguous sequence of a second oligonucleotide. The contiguous sequence may comprise all or a part of a first or second nucleotide sequence.

[0064] As used herein, “substantially complementary” means that in a hybridized pair of nucleobase or nucleotide sequence molecules, at least 85%, but not all, of the bases in a contiguous sequence of a first oligonucleotide will hybridize with the same number of bases in a contiguous sequence of a second oligonucleotide. The contiguous sequence may comprise all or a part of a first or second nucleotide sequence.

[0065] As used herein, the terms “complementary,” “fully complementary,” “partially complementary,” and “substantially complementary” are used with respect to the nucleobase or nucleotide matching between the sense strand and the antisense strand of an RNAi agent, or between the antisense strand of an RNAi agent and a sequence of an AGER mRNA.

[0066] As used herein, the term “substantially identical” or “substantial identity,” as applied to a nucleic acid sequence means the nucleotide sequence (or a portion of a nucleotide sequence) has at least about 85% sequence identity or more, e.g., at least 90%, at least 95%, or at least 99% identity, compared to a reference sequence. Percentage of sequence identity is determined by comparing two optimally aligned sequences over a comparison window. The percentage is calculated by determining the number of positions at which the same type of nucleic acid base occurs in both sequences to yield the number of matched positions, dividing the number of matched positions by the total number of positions in the window of comparison and multiplying the result by 100 to yield the percentage of sequence identity. The inventions disclosed herein encompass nucleotide sequences substantially identical to those disclosed herein.

[0067] As used herein, the terms “treat,” “treatment,” and the like, mean the methods or steps taken to provide relief from or alleviation of the number, severity, and/or frequency of one or more symptoms of a disease in a subject. As used herein, “treat” and “treatment” may include the prevention, management, prophylactic treatment, and/or inhibition or reduction of the number, severity, and/or frequency of one or more symptoms of a disease in a subject.

[0068] As used herein, the phrase “introducing into a cell,” when referring to an RNAi agent, means functionally delivering the RNAi agent into a cell. The phrase “functional delivery,” means delivering the RNAi agent to the cell in a manner that enables the RNAi agent to have the expected biological activity, e.g., sequence-specific inhibition of gene expression.

[0069] Unless stated otherwise, use of the symbol [symbol] as used herein means that any group or groups may be linked thereto that is in accordance with the scope of the inventions described herein.

[0070] As used herein, the term “isomers” refers to compounds that have identical molecular formulae, but that differ in the nature or the sequence of bonding of their atoms or in the arrangement of their atoms in space. Isomers that differ in the arrangement of their atoms in space are termed “stereoisomers.” Stereoisomers that are not mirror images of one another are termed “diastereoisomers,” and stereoisomers that are non-superimposable mirror images are termed “enantiomers,” or sometimes optical isomers. A carbon atom bonded to four non-identical substituents is termed a “chiral center.”

[0071] As used herein, unless specifically identified in a structure as having a particular conformation, for each structure in which asymmetric centers are present and thus give rise to enantiomers, diastereomers, or other stereoisomeric configurations, each structure disclosed herein is intended to represent all such possible isomers, including their optically pure and racemic forms. For example, the structures disclosed herein are intended to cover mixtures of diastereomers as well as single stereoisomers.

[0072] As used in a claim herein, the phrase “consisting of” excludes any element, step, or ingredient not specified in the claim. When used in a claim herein, the phrase “consisting essentially of” limits the scope of a claim to the specified materials or steps and those that do not materially affect the basic and novel characteristic(s) of the claimed invention.

[0073] The person of ordinary skill in the art would readily understand and appreciate that the compounds and compositions disclosed herein may have certain atoms (e.g., N, O, or S atoms) in a protonated or deprotonated state, depending upon the environment in which the compound or composition is placed. Accordingly, as used herein, the structures disclosed herein envisage that certain functional groups, such as, for example, OH, SH, or NH, may be protonated or deprotonated. The disclosure herein is intended to cover the disclosed compounds and compositions regardless of their state of protonation based on the environment (such as pH), as would be readily understood by the person of ordinary skill in the art. Correspondingly, compounds described herein with labile protons or basic atoms should also be understood to represent salt forms of the corresponding compound. Compounds described herein may be in a free acid, free base, or salt form. Pharmaceutically acceptable salts of the compounds described herein should be understood to be within the scope of the invention.

[0074] As used herein, the term “linked” or “conjugated” when referring to the connection between two compounds or molecules means that two compounds or molecules are joined by a covalent bond. Unless stated, the terms “linked” and “conjugated” as used herein may refer to the connection between a first compound and a second compound either with or without any intervening atoms or groups of atoms.

[0075] As used herein, the term “including” is used to herein mean, and is used interchangeably with, the phrase “including but not limited to.” The term “or” is used herein to mean, and is used interchangeably with, the term “and/or,” unless the context clearly indicates otherwise.

[0076] Unless otherwise defined, all technical and scientific terms used herein have the same meaning as commonly understood by one of ordinary skill in the art. Although methods and materials similar or equivalent to those described herein can be used in the practice or testing of the present invention, suitable methods and materials are described below. All publications, patent applications, patents, and other references mentioned herein are incorporated by reference in their entirety. In case of conflict, the present specification, including definitions, will control. In addition, the materials, methods, and examples are illustrative only and not intended to be limiting.

[0077] Other objects, features, aspects, and advantages of the invention will be apparent from the following detailed description, accompanying figures, and from the claims.

### BRIEF DESCRIPTION OF THE DRAWINGS

[0078] FIG. 1. Chemical structure representation of the tridentate αvβ6 epithelial cell targeting ligand referred to herein as Tri-SM6.1-αvβ6-(TA14).

[0079] FIG. 2. Chemical structure representation of the peptide αvβ6 epithelial cell targeting ligand referred to herein as αvβ6-pep1.

[0080] FIG. 3A to 3E. Chemical structure representation of RAGE RNAi agent conjugate AC000292 (AM10309-AS (SEQ ID NO: 3), CS000363 (SEQ ID NO: 10)) shown as a free acid.

[0081] FIG. 4A to 4E. Chemical structure representation of RAGE RNAi agent conjugate AC000292 (AM10309-AS (SEQ ID NO: 3), CS000363 (SEQ ID NO: 10)) shown as a sodium salt.

[0082] FIG. 5A to 5E. Chemical structure representation of RAGE RNAi agent conjugate AC001266 (AM11897-AS (SEQ ID NO: 5), CS001579 (SEQ ID NO: 11)) shown as a free acid.

[0083] FIG. 6A to 6E. Chemical structure representation of RAGE RNAi agent conjugate AC001266 (AM11897-AS (SEQ ID NO: 5), CS001579 (SEQ ID NO: 11)) shown as a sodium salt.

[0084] FIG. 7A to 7E. Chemical structure representation of RAGE RNAi agent conjugate AC001267 (AM11898-AS (SEQ ID NO: 6), CS001579 (SEQ ID NO: 11)) shown as a free acid.

[0085] FIG. 8A to 8E. Chemical structure representation of RAGE RNAi agent conjugate AC001267 (AM11898-AS (SEQ ID NO: 6), CS001579 (SEQ ID NO: 11)) shown as a sodium salt.

[0086] FIG. 9A to 9E. Chemical structure representation of RAGE RNAi agent conjugate AC001268 (AM10754-AS (SEQ ID NO: 4), CS001582 (SEQ ID NO: 12)) shown as a free acid.

[0087] FIG. 10A to 10E. Chemical structure representation of RAGE RNAi agent conjugate AC001268 (AM10754-AS (SEQ ID NO: 4), CS001582 (SEQ ID NO: 12)) shown as a sodium salt.

[0088] FIG. 11A. Schematic diagram of the modified sense and antisense strands of the RAGE RNAi agent conjugate having the structure of AC000286 (AM10308-AS (SEQ ID NO: 2), CS000363 (SEQ ID NO: 10)) (see, e.g., Tables 8 and 10), having a tridentate αvβ6 epithelial cell targeting ligand linked at the 5′ end of the sense strand.

[0089] The following abbreviations are used in FIGS. 11A to 11J: a, c, g, i, and u are 2′-O-methyl modified nucleotides; Af, Cf, Gf, and Uf are 2′-fluoro modified nucleotides; o is a phosphodiester linkage; s is a phosphorothioate linkage; invAb is an inverted abasic residue (see, e.g., Table 11); cPrpu is a 5′-cyclopropyl phosphonate-2′-O-methyluridine modified nucleotide (see, e.g., Table 11); Tri-SM6.1-αvβ6-(TA14) is the tridentate αvβ6 epithelial cell targeting ligand having the structure shown in FIG. 1; and (TriAlk14) is the linking group as shown in Table 11, which is suitable for subsequent coupling to targeting ligands (See also, Example 1 herein).

[0090] FIG. 11B. Schematic diagram of the modified sense and antisense strands of the RAGE RNAi agent conjugate having the structure of AC000292 (AM10309-AS (SEQ ID NO: 3), CS000363 (SEQ ID NO: 10)) (see, e.g., Tables 8 and 10), having a tridentate αvβ6 epithelial cell targeting ligand linked at the 5′ end of the sense strand.

[0091] FIG. 11C. Schematic diagram of the modified sense and antisense strands of the RAGE RNAi agent conjugate having the structure of AC001266 (AM11897-AS (SEQ ID NO: 5), CS001579 (SEQ ID NO: 11)) (see, e.g., Tables 8 and 10), having a tridentate αvβ6 epithelial cell targeting ligand linked at the 5′ end of the sense strand.

[0092] FIG. 11D. Schematic diagram of the modified sense and antisense strands of the RAGE RNAi agent conjugate having the structure of AC001267 (AM11898-AS (SEQ ID NO: 6), CS001579 (SEQ ID NO: 11)) (see, e.g., Tables 8 and 10), having a tridentate αvβ6 epithelial cell targeting ligand linked at the 5′ end of the sense strand.

[0093] FIG. 11E. Schematic diagram of the modified sense and antisense strands of the RAGE RNAi agent conjugate having the structure of AC001268 (AM10754-AS (SEQ ID NO: 4), CS001582 (SEQ ID NO: 12)) (see, e.g., Tables 8 and 10), having a tridentate αvβ6 epithelial cell targeting ligand linked at the 5′ end of the sense strand.

[0094] FIG. 11F. Schematic diagram of the modified sense and antisense strands of the RAGE RNAi agent duplex having the structure of AD07474 (AM10308-AS (SEQ ID NO: 2), AM10307-SS (SEQ ID NO: 16)) (see, e.g., Table 7B), having a (TriAlk14) linker at the 5′ end of the sense strand.

[0095] FIG. 11G. Schematic diagram of the modified sense and antisense strands of the RAGE RNAi agent duplex having the structure of AD07475 (AM10309-AS (SEQ ID NO: 3), AM10307-SS (SEQ ID NO: 16)) (see, e.g., Table 7B), having a (TriAlk14) linker at the 5′ end of the sense strand.

[0096] FIG. 11H. Schematic diagram of the modified sense and antisense strands of the RAGE RNAi agent duplex having the structure of AD09150 (AM11897-AS (SEQ ID NO: 5), AM12910-SS (SEQ ID NO: 17)) (see, e.g., Table 7B), having a (TriAlk14) linker at the 5′ end of the sense strand.

[0097] FIG. 11I. Schematic diagram of the modified sense and antisense strands of the RAGE RNAi agent duplex having the structure of AD09151 (AM11898-AS (SEQ ID NO: 6), AM12910-SS (SEQ ID NO: 17)) (see, e.g., Table 7B), having a (TriAlk14) linker at the 5′ end of the sense strand.

[0098] FIG. 11J. Schematic diagram of the modified sense and antisense strands of the RAGE RNAi agent duplex having the structure of AD09152 (AM10754-AS (SEQ ID NO: 4), AM12911-SS (SEQ ID NO: 18)) (see, e.g., Table 7B), having a (TriAlk14) linker at the 5′ end of the sense strand.

### DETAILED DESCRIPTION

### RNAi Agents

[0099] Described herein are RNAi agents for inhibiting expression of the AGER (or RAGE) gene (referred to herein as RAGE RNAi agents or RAGE RNAi triggers). Each RAGE RNAi agent disclosed herein comprises a sense strand and an antisense strand. The length of the RNAi agent sense strands described herein each can be 15 to 49 nucleotides in length. The length of the RNAi agent antisense strands described herein each can be 18 to 49 nucleotides in length. In some embodiments, the sense and antisense strands are independently 18 to 26 nucleotides in length. The sense and antisense strands can be either the same length or different lengths. In some embodiments, the sense and antisense strands are independently 21 to 26 nucleotides in length. In some embodiments, the sense and antisense strands are independently 21 to 24 nucleotides in length. In some embodiments, both the sense strand and the antisense strand are 21 nucleotides in length. In some embodiments, the antisense strands are independently 18, 19, 20, 21, 22, 23, 24, 25, 26, 27, 28, 29, or 30 nucleotides in length. In some embodiments, the sense strands are independently 15, 16, 17, 18, 19, 20, 21, 22, 23, 24, 25, 26, 27, 28, 29, 30, 31, 32, 33, 34, 35, 36, 37, 38, 39, 40, 41, 42, 43, 44, 45, 46, 47, 48, or 49 nucleotides in length. In some embodiments, a double-stranded RNAi agent has a duplex length of about 16, 17, 18, 19, 20, 21, 22, 23 or 24 nucleotides.

[0100] Examples of nucleotide sequences used in forming RAGE RNAi agents are provided in Tables 2, 3, 4, 5, 6, and 10. Examples of RNAi agent duplexes, that include the sense strand and antisense strand sequences in Tables 2, 3, 4, 5, 6, are shown in Tables 7A, 7B, 8, 9A, 9B, and 10.

[0101] In some embodiments, the region of perfect, substantial, or partial complementarity between the sense strand and the antisense strand is 15-26 (e.g., 15, 16, 17, 18, 19, 20, 21, 22, 23, 24, 25, or 26) nucleotides in length and occurs at or near the 5′ end of the antisense strand (e.g., this region may be separated from the 5′ end of the antisense strand by 0, 1, 2, 3, or 4 nucleotides that are not perfectly, substantially, or partially complementary).

[0102] A sense strand of the RAGE RNAi agents described herein includes at least 15 consecutive nucleotides that have at least 85% identity to a core stretch sequence (also referred to herein as a “core stretch” or “core sequence”) of the same number of nucleotides in an AGER mRNA. In some embodiments, a sense strand core stretch sequence is 100% (perfectly) complementary or at least about 85% (substantially) complementary to a core stretch sequence in the antisense strand, and thus the sense strand core stretch sequence is typically perfectly identical or at least about 85% identical to a nucleotide sequence of the same length (sometimes referred to, e.g., as a target sequence) present in the AGER mRNA target. In some embodiments, this sense strand core stretch is 15, 16, 17, 18, 19, 20, 21, 22, or 23 nucleotides in length. In some embodiments, this sense strand core stretch is 17 nucleotides in length. In some embodiments, this sense strand core stretch is 19 nucleotides in length.

[0103] An antisense strand of a RAGE RNAi agent described herein includes at least 15 consecutive nucleotides that have at least 85% complementarity to a core stretch of the same number of nucleotides in an AGER mRNA and to a core stretch of the same number of nucleotides in the corresponding sense strand. In some embodiments, an antisense strand core stretch is 100% (perfectly) complementary or at least about 85% (substantially) complementary to a nucleotide sequence (e.g., target sequence) of the same length present in the AGER mRNA target. In some embodiments, this antisense strand core stretch is 15, 16, 17, 18, 19, 20, 21, 22, 23, 24, 25, or 26 nucleotides in length. In some embodiments, this antisense strand core stretch is 19 nucleotides in length. In some embodiments, this antisense strand core stretch is 17 nucleotides in length. A sense strand core stretch sequence can be the same length as a corresponding antisense core sequence or it can be a different length.

[0104] The RAGE RNAi agent sense and antisense strands anneal to form a duplex. A sense strand and an antisense strand of a RAGE RNAi agent can be partially, substantially, or fully complementary to each other. Within the complementary duplex region, the sense strand core stretch sequence is at least 85% complementary or 100% complementary to the antisense core stretch sequence. In some embodiments, the sense strand core stretch sequence contains a sequence of at least 15, at least 16, at least 17, at least 18, at least 19, at least 20, at least 21, at least 22, or at least 23 nucleotides that is at least 85% or 100% complementary to a corresponding 15, 16, 17, 18, 19, 20, 21, 22, or 23 nucleotide sequence of the antisense strand core stretch sequence (i.e., the sense and antisense core stretch sequences of a RAGE RNAi agent have a region of at least 15, at least 16, at least 17, at least 18, at least 19, at least 20, at least 21, at least 22, or at least 23 nucleotides that is at least 85% base paired or 100% base paired.)

[0105] In some embodiments, the antisense strand of a RAGE RNAi agent disclosed herein differs by 0, 1, 2, or 3 nucleotides from any of the antisense strand sequences in Table 2 or Table 3. In some embodiments, the sense strand of a RAGE RNAi agent disclosed herein differs by 0, 1, 2, or 3 nucleotides from any of the sense strand sequences in Table 2, Table 4, Table 5, Table 6, or Table 10.

[0106] In some embodiments, the sense strand and/or the antisense strand can optionally and independently contain an additional 1, 2, 3, 4, 5, or 6 nucleotides (extension) at the 3′ end, the 5′ end, or both the 3′ and 5′ ends of the core stretch sequences. The antisense strand additional nucleotides, if present, may or may not be complementary to the corresponding sequence in the AGER mRNA. The sense strand additional nucleotides, if present, may or may not be identical to the corresponding sequence in the AGER mRNA. The antisense strand additional nucleotides, if present, may or may not be complementary to the corresponding sense strand's additional nucleotides, if present.

[0107] As used herein, an extension comprises 1, 2, 3, 4, 5, or 6 nucleotides at the 5′ and/or 3′ end of the sense strand core stretch sequence and/or antisense strand core stretch sequence. The extension nucleotides on a sense strand may or may not be complementary to nucleotides, either core stretch sequence nucleotides or extension nucleotides, in the corresponding antisense strand. Conversely, the extension nucleotides on an antisense strand may or may not be complementary to nucleotides, either core stretch nucleotides or extension nucleotides, in the corresponding sense strand. In some embodiments, both the sense strand and the antisense strand of an RNAi agent contain 3′ and 5′ extensions. In some embodiments, one or more of the 3′ extension nucleotides of one strand base pairs with one or more 5′ extension nucleotides of the other strand. In other embodiments, one or more of 3′ extension nucleotides of one strand do not base pair with one or more 5′ extension nucleotides of the other strand. In some embodiments, a RAGE RNAi agent has an antisense strand having a 3′ extension and a sense strand having a 5′ extension. In some embodiments, the extension nucleotide(s) are unpaired and form an overhang. As used herein, an “overhang” refers to a stretch of one or more unpaired nucleotides located at a terminal end of either the sense strand or the antisense strand that does not form part of the hybridized or duplexed portion of an RNAi agent disclosed herein.

[0108] In some embodiments, a RAGE RNAi agent comprises an antisense strand having a 3′ extension of 1, 2, 3, 4, 5, or 6 nucleotides in length. In other embodiments, a RAGE RNAi agent comprises an antisense strand having a 3′ extension of 1, 2, or 3 nucleotides in length. In some embodiments, one or more of the antisense strand extension nucleotides comprise nucleotides that are complementary to the corresponding AGER mRNA sequence. In some embodiments, one or more of the antisense strand extension nucleotides comprise nucleotides that are not complementary to the corresponding AGER mRNA sequence.

[0109] In some embodiments, a RAGE RNAi agent comprises a sense strand having a 3′ extension of 1, 2, 3, 4, or 5 nucleotides in length. In some embodiments, one or more of the sense strand extension nucleotides comprises adenosine, uracil, or thymidine nucleotides, AT dinucleotide, or nucleotides that correspond to or are the identical to nucleotides in the AGER mRNA sequence. In some embodiments, the 3′ sense strand extension includes or consists of one of the following sequences, but is not limited to: T, UT, TT, UU, UUT, TTT, or TTTT (each listed 5′ to 3′).

[0110] A sense strand can have a 3′ extension and/or a 5′ extension. In some embodiments, a RAGE RNAi agent comprises a sense strand having a 5′ extension of 1, 2, 3, 4, 5, or 6 nucleotides in length. In some embodiments, one or more of the sense strand extension nucleotides comprise nucleotides that correspond to or are identical to nucleotides in the AGER mRNA sequence.

[0111] Examples of sequences used in forming RAGE RNAi agents are provided in Tables 2, 3, 4, 5, 6, and 10. In some embodiments, a RAGE RNAi agent antisense strand includes a sequence of any of the sequences in Tables 2, 3, or 10. In certain embodiments, a RAGE RNAi agent antisense strand comprises or consists of any one of the modified sequences in Table 3. In some embodiments, a RAGE RNAi agent antisense strand includes the sequence of nucleotides (from 5′ end→3′ end) 1-17, 2-15, 2-17, 1-18, 2-18, 1-19, 2-19, 1-20, 2-20, 1-21, or 2-21, of any of the sequences in Tables 2 or 3. In some embodiments, a RAGE RNAi agent sense strand includes the sequence of any of the sequences in Tables 2, 4, 5, or 6. In some embodiments, a RAGE RNAi agent sense strand includes the sequence of nucleotides (from 5′ end→3′ end) 1-18, 1-19, 1-20, 1-21, 2-19, 2-20, 2-21, 3-20, 3-21, or 4-21 of any of the sequences in Tables 2, 4, 5, or 6. In certain embodiments, a RAGE RNAi agent sense strand comprises or consists of a modified sequence of any one of the modified sequences in Table 4, 5, 6, or 10.

[0112] In some embodiments, the sense and antisense strands of the RNAi agents described herein contain the same number of nucleotides. In some embodiments, the sense and antisense strands of the RNAi agents described herein contain different numbers of nucleotides. In some embodiments, the sense strand 5′ end and the antisense strand 3′ end of an RNAi agent form a blunt end. In some embodiments, the sense strand 3′ end and the antisense strand 5′ end of an RNAi agent form a blunt end. In some embodiments, both ends of an RNAi agent form blunt ends. In some embodiments, neither end of an RNAi agent is blunt-ended. As used herein a “blunt end” refers to an end of a double stranded RNAi agent in which the terminal nucleotides of the two annealed strands are complementary (form a complementary base-pair).

[0113] In some embodiments, the sense strand 5′ end and the antisense strand 3′ end of an RNAi agent form a frayed end. In some embodiments, the sense strand 3′ end and the antisense strand 5′ end of an RNAi agent form a frayed end. In some embodiments, both ends of an RNAi agent form a frayed end. In some embodiments, neither end of an RNAi agent is a frayed end. As used herein a frayed end refers to an end of a double stranded RNAi agent in which the terminal nucleotides of the two annealed strands form a pair (i.e., do not form an overhang) but are not complementary (i.e. form a non-complementary pair). In some embodiments, one or more unpaired nucleotides at the end of one strand of a double stranded RNAi agent form an overhang. The unpaired nucleotides may be on the sense strand or the antisense strand, creating either 3′ or 5′ overhangs. In some embodiments, the RNAi agent contains: a blunt end and a frayed end, a blunt end and 5′ overhang end, a blunt end and a 3′ overhang end, a frayed end and a 5′ overhang end, a frayed end and a 3′ overhang end, two 5′ overhang ends, two 3′ overhang ends, a 5′ overhang end and a 3′ overhang end, two frayed ends, or two blunt ends. Typically, when present, overhangs are located at the 3′ terminal ends of the sense strand, the antisense strand, or both the sense strand and the antisense strand.

[0114] The RAGE RNAi agents disclosed herein may also be comprised of one or more modified nucleotides. In some embodiments, substantially all of the nucleotides of the sense strand and substantially all of the nucleotides of the antisense strand of the RAGE RNAi agent are modified nucleotides. The RAGE RNAi agents disclosed herein may further be comprised of one or more modified internucleoside linkages, e.g., one or more phosphorothioate linkages. In some embodiments, a RAGE RNAi agent contains one or more modified nucleotides and one or more modified internucleoside linkages. In some embodiments, a 2′-modified nucleotide is combined with modified internucleoside linkage.

[0115] In some embodiments, a RAGE RNAi agent is prepared or provided as a salt, mixed salt, or a free-acid. In some embodiments, a RAGE RNAi agent is prepared as a pharmaceutically acceptable salt. In some embodiments, a RAGE RNAi agent is prepared as a pharmaceutically acceptable sodium salt. Such forms that are well known in the art are within the scope of the inventions disclosed herein.

### Modified Nucleotides

[0116] Modified nucleotides, when used in various oligonucleotide constructs, can preserve activity of the compound in cells while at the same time increasing the serum stability of these compounds, and can also minimize the possibility of activating interferon activity in humans upon administration of the oligonucleotide construct.

[0117] In some embodiments, a RAGE RNAi agent contains one or more modified nucleotides. As used herein, a “modified nucleotide” is a nucleotide other than a ribonucleotide (2′-hydroxyl nucleotide). In some embodiments, at least 50% (e.g., at least 60%, at least 70%, at least 80%, at least 90%, at least 95%, at least 97%, at least 98%, at least 99%, or 100%) of the nucleotides are modified nucleotides. As used herein, modified nucleotides can include, but are not limited to, deoxyribonucleotides, nucleotide mimics, abasic nucleotides, 2′-modified nucleotides, inverted nucleotides, modified nucleobase-comprising nucleotides, bridged nucleotides, peptide nucleic acids (PNAs), 2′,3′-seco nucleotide mimics (unlocked nucleobase analogues), locked nucleotides, 3′-O-methoxy (2′ internucleoside linked) nucleotides, 2′-F-Arabino nucleotides, 5′-Me, 2′-fluoro nucleotide, morpholino nucleotides, vinyl phosphonate deoxyribonucleotides, vinyl phosphonate containing nucleotides, and cyclopropyl phosphonate containing nucleotides. 2′-modified nucleotides (i.e., a nucleotide with a group other than a hydroxyl group at the 2′ position of the five-membered sugar ring) include, but are not limited to, 2′-O-methyl nucleotides (also referred to as 2′-methoxy nucleotides), 2′-fluoro nucleotides (also referred to herein and in the art as 2′-deoxy-2′-fluoro nucleotides), 2′-deoxy nucleotides, 2′-methoxyethyl(2′-O-2-methoxylethyl) nucleotides (also referred to as 2′-MOE), 2′-amino nucleotides, and 2′-alkyl nucleotides. It is not necessary for all positions in a given compound to be uniformly modified. Conversely, more than one modification can be incorporated in a single RAGE RNAi agent or even in a single nucleotide thereof. The RAGE RNAi agent sense strands and antisense strands can be synthesized and/or modified by methods known in the art. Modification at one nucleotide is independent of modification at another nucleotide.

[0118] Modified nucleobases include synthetic and natural nucleobases, such as 5-substituted pyrimidines, 6-azapyrimidines and N-2, N-6 and 0-6 substituted purines, (e.g., 2-aminopropyladenine, 5-propynyluracil, or 5-propynylcytosine), 5-methylcytosine (5-me-C), 5-hydroxymethyl cytosine, inosine, xanthine, hypoxanthine, 2-aminoadenine, 6-alkyl (e.g., 6-methyl, 6-ethyl, 6-isopropyl, or 6-n-butyl) derivatives of adenine and guanine, 2-alkyl (e.g., 2-methyl, 2-ethyl, 2-isopropyl, or 2-n-butyl) and other alkyl derivatives of adenine and guanine, 2-thiouracil, 2-thiothymine, 2-thiocytosine, 5-halouracil, cytosine, 5-propynyl uracil, 5-propynyl cytosine, 6-azo uracil, 6-azo cytosine, 6-azo thymine, 5-uracil (pseudouracil), 4-thiouracil, 8-halo, 8-amino, 8-sulfhydryl, 8-thioalkyl, 8-hydroxyl and other 8-substituted adenines and guanines, 5-halo (e.g., 5-bromo), 5-trifluoromethyl, and other 5-substituted uracils and cytosines, 7-methylguanine and 7-methyladenine, 8-azaguanine and 8-azaadenine, 7-deazaguanine, 7-deazaadenine, 3-deazaguanine, and 3-deazaadenine.

[0119] In some embodiments, the 5′ and/or 3′ end of the antisense strand can include abasic residues (Ab), which can also be referred to as an “abasic site” or “abasic nucleotide.” An abasic residue (Ab) is a nucleotide or nucleoside that lacks a nucleobase at the 1′ position of the sugar moiety. (See, e.g., U.S. Pat. No. 5,998,203). In some embodiments, an abasic residue can be placed internally in a nucleotide sequence. In some embodiments, Ab or AbAb can be added to the 3′ end of the antisense strand. In some embodiments, the 5′ end of the sense strand can include one or more additional abasic residues (e.g., (Ab) or (AbAb)). In some embodiments, UUAb, UAb, or Ab are added to the 3′ end of the sense strand. In some embodiments, an abasic (deoxyribose) residue can be replaced with a ribitol (abasic ribose) residue.

[0120] In some embodiments, all or substantially all of the nucleotides of an RNAi agent are modified nucleotides. As used herein, an RNAi agent wherein substantially all of the nucleotides present are modified nucleotides is an RNAi agent having four or fewer (i.e., 0, 1, 2, 3, or 4) nucleotides in both the sense strand and the antisense strand being ribonucleotides (i.e., unmodified). As used herein, a sense strand wherein substantially all of the nucleotides present are modified nucleotides is a sense strand having two or fewer (i.e., 0, 1, or 2) nucleotides in the sense strand being unmodified ribonucleotides. As used herein, an antisense sense strand wherein substantially all of the nucleotides present are modified nucleotides is an antisense strand having two or fewer (i.e., 0, 1, or 2) nucleotides in the sense strand being unmodified ribonucleotides. In some embodiments, one or more nucleotides of an RNAi agent is an unmodified ribonucleotide. Chemical structures for certain modified nucleotides are set forth in Table 11 herein.

### Modified Internucleoside Linkages

[0121] In some embodiments, one or more nucleotides of a RAGE RNAi agent are linked by non-standard linkages or backbones (i.e., modified internucleoside linkages or modified backbones). Modified internucleoside linkages or backbones include, but are not limited to, phosphorothioate groups (represented herein as a lower case “s”), chiral phosphorothioates, thiophosphates, phosphorodithioates, phosphotriesters, aminoalkyl-phosphotriesters, alkyl phosphonates (e.g., methyl phosphonates or 3′-alkylene phosphonates), chiral phosphonates, phosphinates, phosphoramidates (e.g., 3′-amino phosphoramidate, aminoalkylphosphoramidates, or thionophosphoramidates), thionoalkyl-phosphonates, thionoalkylphosphotriesters, morpholino linkages, boranophosphates having normal 3′-5′ linkages, 2′-5′ linked analogs of boranophosphates, or boranophosphates having inverted polarity wherein the adjacent pairs of nucleoside units are linked 3′-5′ to 5′-3′ or 2′-5′ to 5′-2′. In some embodiments, a modified internucleoside linkage or backbone lacks a phosphorus atom. Modified internucleoside linkages lacking a phosphorus atom include, but are not limited to, short chain alkyl or cycloalkyl inter-sugar linkages, mixed heteroatom and alkyl or cycloalkyl inter-sugar linkages, or one or more short chain heteroatomic or heterocyclic inter-sugar linkages. In some embodiments, modified internucleoside backbones include, but are not limited to, siloxane backbones, sulfide backbones, sulfoxide backbones, sulfone backbones, formacetyl and thioformacetyl backbones, methylene formacetyl and thioformacetyl backbones, alkene-containing backbones, sulfamate backbones, methyleneimino and methylenehydrazino backbones, sulfonate and sulfonamide backbones, amide backbones, and other backbones having mixed N, O, S, and CH₂ components.

[0122] In some embodiments, a sense strand of a RAGE RNAi agent can contain 1, 2, 3, 4, 5, or 6 phosphorothioate linkages, an antisense strand of a RAGE RNAi agent can contain 1, 2, 3, 4, 5, or 6 phosphorothioate linkages, or both the sense strand and the antisense strand independently can contain 1, 2, 3, 4, 5, or 6 phosphorothioate linkages. In some embodiments, a sense strand of a RAGE RNAi agent can contain 1, 2, 3, or 4 phosphorothioate linkages, an antisense strand of a RAGE RNAi agent can contain 1, 2, 3, or 4 phosphorothioate linkages, or both the sense strand and the antisense strand independently can contain 1, 2, 3, or 4 phosphorothioate linkages.

[0123] In some embodiments, a RAGE RNAi agent sense strand contains at least two phosphorothioate internucleoside linkages. In some embodiments, the phosphorothioate internucleoside linkages are between the nucleotides at positions 1-3 from the 3′ end of the sense strand. In some embodiments, one phosphorothioate internucleoside linkage is at the 5′ end of the sense strand nucleotide sequence, and another phosphorothioate linkage is at the 3′ end of the sense strand nucleotide sequence. In some embodiments, two phosphorothioate internucleoside linkage are located at the 5′ end of the sense strand, and another phosphorothioate linkage is at the 3′ end of the sense strand. In some embodiments, the sense strand does not include any phosphorothioate internucleoside linkages between the nucleotides, but contains one, two, or three phosphorothioate linkages between the terminal nucleotides on both the 5′ and 3′ ends and the optionally present inverted abasic residue terminal caps. In some embodiments, the targeting ligand is linked to the sense strand via a phosphorothioate linkage.

[0124] In some embodiments, a RAGE RNAi agent antisense strand contains four phosphorothioate internucleoside linkages. In some embodiments, the four phosphorothioate internucleoside linkages are between the nucleotides at positions 1-3 from the 5′ end of the antisense strand and between the nucleotides at positions 19-21, 20-22, 21-23, 22-24, 23-25, or 24-26 from the 5′ end. In some embodiments, three phosphorothioate internucleoside linkages are located between positions 1~4 from the 5′ end of the antisense strand, and a fourth phosphorothioate internucleoside linkage is located between positions 20-21 from the 5′ end of the antisense strand. In some embodiments, a RAGE RNAi agent contains at least three or four phosphorothioate internucleoside linkages in the antisense strand.

### Capping Residues or Moieties

[0125] In some embodiments, the sense strand may include one or more capping residues or moieties, sometimes referred to in the art as a “cap,” a “terminal cap,” or a “capping residue.” As used herein, a “capping residue” is a non-nucleotide compound or other moiety that can be incorporated at one or more termini of a nucleotide sequence of an RNAi agent disclosed herein. A capping residue can provide the RNAi agent, in some instances, with certain beneficial properties, such as, for example, protection against exonuclease degradation. In some embodiments, inverted abasic residues (invAb) (also referred to in the art as “inverted abasic sites”) are added as capping residues (see Table 11). (See, e.g., F. Czauderna, Nucleic Acids Res., 2003, 31(11), 2705-16). Capping residues are generally known in the art, and include, for example, inverted abasic residues as well as carbon chains such as a terminal C₃H₇ (propyl), C₆H₁₃ (hexyl), or C₁₂H₂₅ (dodecyl) groups. In some embodiments, a capping residue is present at either the 5′ terminal end, the 3′ terminal end, or both the 5′ and 3′ terminal ends of the sense strand. In some embodiments, the 5′ end and/or the 3′ end of the sense strand may include more than one inverted abasic deoxyribose moiety as a capping residue.

[0126] In some embodiments, one or more inverted abasic residues (invAb) are added to the 3′ end of the sense strand. In some embodiments, one or more inverted abasic residues (invAb) are added to the 5′ end of the sense strand. In some embodiments, one or more inverted abasic residues or inverted abasic sites are inserted between the targeting ligand and the nucleotide sequence of the sense strand of the RNAi agent. In some embodiments, the inclusion of one or more inverted abasic residues or inverted abasic sites at or near the terminal end or terminal ends of the sense strand of an RNAi agent allows for enhanced activity or other desired properties of an RNAi agent.

[0127] In some embodiments, one or more inverted abasic residues (invAb) are added to the 5′ end of the sense strand. In some embodiments, one or more inverted abasic residues can be inserted between the targeting ligand and the nucleotide sequence of the sense strand of the RNAi agent. The inverted abasic residues may be linked via phosphate, phosphorothioate (e.g., shown herein as (invAb) s)), or other internucleoside linkages. In some embodiments, the inclusion of one or more inverted abasic residues at or near the terminal end or terminal ends of the sense strand of an RNAi agent may allow for enhanced activity or other desired properties of an RNAi agent. In some embodiments, an inverted abasic (deoxyribose) residue can be replaced with an inverted ribitol (abasic ribose) residue. In some embodiments, the 3′ end of the antisense strand core stretch sequence, or the 3′ end of the antisense strand sequence, may include an inverted abasic residue. The chemical structures for inverted abasic deoxyribose residues are shown in Table 11 below.

### RAGE RNAi Agents

[0128] The RAGE RNAi agents disclosed herein are designed to target specific positions on an AGER (RAGE) gene (e.g., SEQ ID NO:1 (NM_001136.5)). As defined herein, an antisense strand sequence is designed to target an AGER gene at a given position on the gene when the 5′ terminal nucleobase of the antisense strand is aligned with a position that is 21 nucleotides downstream (towards the 3′ end) from the position on the gene when base pairing to the gene. For example, as illustrated in Tables 1 and 2 herein, an antisense strand sequence designed to target an AGER gene at position 177 requires that when base pairing to the gene, the 5′ terminal nucleobase of the antisense strand is aligned with position 197 of an AGER gene.

[0129] As provided herein, a RAGE RNAi agent does not require that the nucleobase at position 1 (5′→3′) of the antisense strand be complementary to the gene, provided that there is at least 85% complementarity (e.g., at least 85, 86, 87, 88, 89, 90, 91, 92, 93, 94, 95, 96, 97, 98, 99, or 100% complementarity) of the antisense strand and the gene across a core stretch sequence of at least 16 consecutive nucleotides. For example, for a RAGE RNAi agent disclosed herein that is designed to target position 177 of an AGER gene, the 5′ terminal nucleobase of the antisense strand of the of the RAGE RNAi agent must be aligned with position 197 of the gene; however, the 5′ terminal nucleobase of the antisense strand may be, but is not required to be, complementary to position 197 of an AGER gene, provided that there is at least 85% complementarity (e.g., at least 85, 86, 87, 88, 89, 90, 91, 92, 93, 94, 95, 96, 97, 98, 99, or 100% complementarity) of the antisense strand and the gene across a core stretch sequence of at least 16 consecutive nucleotides. As shown by, among other things, the various examples disclosed herein, the specific site of binding of the gene by the antisense strand of the RAGE RNAi agent (e.g., whether the RAGE RNAi agent is designed to target an AGER gene at position 177, at position 90, at position 330, or at some other position) is an important factor to the level of inhibition achieved by the RAGE RNAi agent. (See, e.g., Kamola et al., The siRNA Non-seed Region and Its Target Sequences are Auxiliary Determinants of Off-Target Effects, PLOS Computational Biology, 11(12), FIG. 1 (2015)).

[0130] In some embodiments, the RAGE RNAi agents disclosed herein target an AGER gene at or near the positions of the AGER sequence shown in Table 1. In some embodiments, the antisense strand of a RAGE RNAi agent disclosed herein includes a core stretch sequence that is fully, substantially, or at least partially complementary to a target RAGE 19-mer sequence disclosed in Table 1.

TABLE 1
AGER (RAGE) 19-mer mRNA Target Sequences (taken
from homo sapiens advanced glycosylation end-
product specific receptor (AGER), transcript
variant 1, GenBank NM_001136.5 (SEQ ID NO: 1))

| | | Corre- | |
|---|---|---|---|
| | | sponding | Targeted |
| | | Positions | Gene |
| | | of | Position |
| SEQ | AGER (RAGE) 19-mer | Sequence | (as |
| ID | Target Sequences | on SEQ ID | referred |
| No. | (5′→3′) | NO: 1 | to herein) |
| 22 | GAAUGGAAACUGAACACAG | 179-197 | 177 |
| 23 | GUAGGUGCUCAAAACAUCA | 92-110 | 90 |
| 24 | GCAAUGAACAGGAAUGGAA | 332-350 | 330 |
| 25 | AAUGGAAACUGAACACAGG | 180-198 | 178 |
| 26 | CAGAUUCCUGGGAAGCCAG | 386-404 | 384 |
| 27 | CUGGGAAGCCAGAAAUUGU | 393-411 | 391 |
| 28 | CACUGGUGCUGAAGUGUAA | 129-147 | 127 |
| 29 | GACAGAAGCUUGGAAGGUC | 202-220 | 200 |
| 30 | GGAUGAGGGGAUUUUCCGG | 307-325 | 305 |
| 31 | AUUCCUGGGAAGCCAGAAA | 389-407 | 387 |
| 32 | AUUCUGCCUCUGAACUCAC | 414-432 | 412 |
| 33 | CCCUGCAGGGACUCUUAGC | 481-499 | 479 |
| 34 | CCUGCAGGGACUCUUAGCU | 482-500 | 480 |
| 35 | CCACCUUCUCCUGUAGCUU | 642-660 | 640 |
| 36 | CUUCUCCUGUAGCUUCAGC | 646-664 | 644 |
| 37 | UGCUGGUCCUCAGUCUGUG | 63-81 | 61 |
| 38 | GCUGGUCCUCAGUCUGUGG | 64-82 | 62 |
| 39 | UCCGUGUCUACCAGAUUCC | 375-393 | 373 |
| 40 | CGUGUCUACCAGAUUCCUG | 377-395 | 375 |
| 41 | CACCUUCUCCUGUAGCUUC | 643-661 | 641 |
| 42 | CCUCAAAUCCACUGGAUGA | 830-848 | 828 |
| 43 | UAGAUUCUGCCUCUGAACU | 411-429 | 409 |
| 44 | GAUUCUGCCUCUGAACUCA | 413-431 | 411 |
| 45 | CUGGUGUUCCCAAUAAGGU | 435-453 | 433 |
| 46 | GGUGUUCCCAAUAAGGUGG | 437-455 | 435 |
| 47 | UUAGCUGGCACUUGGAUGG | 495-513 | 493 |
| 48 | UAAUGAGAAGGGAGUAUCU | 529-547 | 527 |
| 49 | GAGAAGGGAGUAUCUGUGA | 533-551 | 531 |
| 50 | GCAUCAGCAUCAUCGAACC | 981-999 | 979 |
| 51 | UGAACAGGAAUGGAAAGGA | 336-354 | 334 |
| 52 | CUACCGAGUCCGUGUCUAC | 367-385 | 365 |
| 53 | UGGGAAGCCAGAAAUUGUA | 394-412 | 392 |
| 54 | CCUAAUGAGAAGGGAGUAU | 527-545 | 525 |

[0131] Homo sapiens advanced glycosylation end-product specific receptor (AGER), transcript variant 1, GenBank NM_001136.5 (SEQ ID NO:1), gene transcript (1420 bases):

| | |
|---|---|
| 1 | agacagagcc aggaccctgg aaggaagcag gatggctgcc ggaacagcag ttggagcctg |
| 61 | ggtgctggtc ctcagtctgt ggggggcagt agtaggtgct caaaacatca cagcccggat |
| 121 | tggcgagcca ctggtgctga agtgtaaggg ggcccccaag aaaccacccc agcggctgga |
| 181 | atggaaactg aacacaggcc ggacagaagc ttggaaggtc ctgtctcccc agggaggagg |
| 241 | cccctgggac agtgtggctc gtgtccttcc caacggctcc ctcttccttc cggctgtcgg |
| 301 | gatccaggat gaggggattt tccggtgcca ggcaatgaac aggaatggaa aggagaccaa |
| 361 | gtccaactac cgagtccgtg tctaccagat tcctgggaag ccagaaattg tagattctgc |
| 421 | ctctgaactc acggctggtg ttcccaataa ggtggggaca tgtgtgtcag agggaagcta |
| 481 | ccctgcaggg actcttagct ggcacttgga tgggaagccc ctggtgccta atgagaaggg |
| 541 | agtatctgtg aaggaacaga ccaggagaca ccctgagaca gggctcttca cactgcagtc |
| 601 | ggagctaatg gtgaccccag cccggggagg agatccccgt cccaccttct cctgtagctt |
| 661 | cagcccaggc cttccccgac accgggcctt gcgcacagcc cccatccagc cccgtgtctg |
| 721 | ggagcctgtg cctctggagg aggtccaatt ggtggtggag ccagaaggtg gagcagtagc |
| 781 | tcctggtgga accgtaaccc tgacctgtga agtccctgcc cagccctctc ctcaaatcca |
| 841 | ctggatgaag gatggtgtgc ccttgcccct tccccccagc cctgtgctga tcctccctga |
| 901 | gatagggcct caggaccagg gaacctacag ctgtgtggcc acccattcca gccacgggcc |
| 961 | ccaggaaagc cgtgctgtca gcatcagcat catcgaacca ggcgaggagg ggccaactgc |
| 1021 | aggctctgtg ggaggatcag ggctgggaac tctagccctg gccctgggga tcctgggagg |
| 1081 | cctggggaca gccgccctgc tcattggggt catcttgtgg caaaggcggc aacgccgagg |
| 1141 | agaggagagg aaggccccag aaaaccagga ggaagaggag gagcgtgcag aactgaatca |
| 1201 | gtcggaggaa cctgaggcag gcgagagtag tactggaggg ccttgagggg cccacagaca |
| 1261 | gatcccatcc atcagctccc ttttcttttt cccttgaact gttctggcct cagaccaact |
| 1321 | ctctcctgta taatctctct cctgtataac cccaccttgc caagctttct tctacaacca |
| 1381 | gagcccccca caatgatgat taaacacctg acacatcttg |

[0132] In some embodiments, a RAGE RNAi agent includes an antisense strand wherein position 19 of the antisense strand (5′→3′) is capable of forming a base pair with position 1 of a 19-mer target sequence disclosed in Table 1. In some embodiments, a RAGE RNAi agent includes an antisense strand wherein position 1 of the antisense strand (5′→3′) is capable of forming a base pair with position 19 of a 19-mer target sequence disclosed in Table 1.

[0133] In some embodiments, a RAGE RNAi agent includes an antisense strand wherein position 2 of the antisense strand (5′→3′) is capable of forming a base pair with position 18 of a 19-mer target sequence disclosed in Table 1. In some embodiments, a RAGE RNAi agent includes an antisense strand wherein positions 2 through 18 of the antisense strand (5′→3′) are capable of forming base pairs with each of the respective complementary bases located at positions 18 through 2 of the 19-mer target sequence disclosed in Table 1.

[0134] For the RNAi agents disclosed herein, the nucleotide at position 1 of the antisense strand (from 5′ end→3′ end) can be perfectly complementary to an AGER gene, or can be non-complementary to an AGER gene. In some embodiments, the nucleotide at position 1 of the antisense strand (from 5′ end→3′ end) is a U, A, or dT. In some embodiments, the nucleotide at position 1 of the antisense strand (from 5′ end→3′ end) forms an A:U or U:A base pair with the sense strand.

[0135] In some embodiments, a RAGE RNAi agent antisense strand comprises the sequence of nucleotides (from 5′ end→3′ end) 2-18 or 2-19 of any of the antisense strand sequences in Table 2 or Table 3. In some embodiments, a RAGE RNAi sense strand comprises the sequence of nucleotides (from 5′ end→3′ end) 1-17, 1-18, or 2-18 of any of the sense strand sequences in Table 2, Table 4, Table 5, or Table 6.

[0136] In some embodiments, a RAGE RNAi agent is comprised of (i) an antisense strand comprising the sequence of nucleotides (from 5′ end→3′ end) 2-18 or 2-19 of any of the antisense strand sequences in Table 2 or Table 3, and (ii) a sense strand comprising the sequence of nucleotides (from 5′ end→3′ end) 1-17 or 1-18 of any of the sense strand sequences in Table 2, Table 4, Table 5, or Table 6.

[0137] In some embodiments, the RAGE RNAi agents include core 19-mer nucleotide sequences shown in the following Table 2.

TABLE 2
RAGE RNAi Agent Antisense Strand and Sense Strand Core Stretch Base
Sequences (N = any nucleobase; I = inosine (hypoxanthine) nucleobase)

| | | | | Corre- | |
|---|---|---|---|---|---|
| | | | | sponding | |
| | | | | Positions | |
| | | | | of | |
| | Antisense Strand | | Sense Strand | Identified | |
| | Base Sequence | | Base Sequence | Sequence | |
| SEQ | (5′→3′) (Shown | SEQ | (5′→3′) (Shown | on | Targeted |
| ID | as an Unmodified | ID | as an Unmodified | SEQ ID | Gene |
| NO:. | Nucleotide Sequence) | NO:. | Nucleotide Sequence) | NO: 1 | Position |
| 55 | UUGUGUUCAGUUUCCAUUC | 298 | GAAUGGAAACUGAACACAA | 179-197 | 177 |
| 56 | AUGUGUUCAGUUUCCAUUC | 299 | GAAUGGAAACUGAACACAU | 179-197 | 177 |
| 57 | CUGUGUUCAGUUUCCAUUC | 300 | GAAUGGAAACUGAACACAG | 179-197 | 177 |
| 58 | NUGUGUUCAGUUUCCAUUC | 301 | GAAUGGAAACUGAACACAN | 179-197 | 177 |
| 59 | NUGUGUUCAGUUUCCAUUN | 302 | NAAUGGAAACUGAACACAN | 179-197 | 177 |
| 60 | UUGUGUUCAGUUUCCAUUC | 303 | GAAUGGAAACUIAACACAA | 179-197 | 177 |
| 61 | AUGUGUUCAGUUUCCAUUC | 304 | GAAUGGAAACUIAACACAU | 179-197 | 177 |
| 62 | CUGUGUUCAGUUUCCAUUC | 305 | GAAUGGAAACUIAACACAG | 179-197 | 177 |
| 63 | NUGUGUUCAGUUUCCAUUC | 306 | GAAUGGAAACUIAACACAN | 179-197 | 177 |
| 64 | NUGUGUUCAGUUUCCAUUN | 307 | NAAUGGAAACUIAACACAN | 179-197 | 177 |
| 65 | UGAUGUUUUGAGCACCUAC | 308 | GUAGGUGCUCAAAACAUCA | 92-110 | 90 |
| 66 | AGAUGUUUUGAGCACCUAC | 309 | GUAGGUGCUCAAAACAUCU | 92-110 | 90 |
| 67 | NGAUGUUUUGAGCACCUAC | 310 | GUAGGUGCUCAAAACAUCN | 92-110 | 90 |
| 68 | NGAUGUUUUGAGCACCUAN | 311 | NUAGGUGCUCAAAACAUCN | 92-110 | 90 |
| 69 | UUCCAUUCCUGUUCAUUGC | 312 | GCAAUGAACAGGAAUGGAA | 332-350 | 330 |
| 70 | AUCCAUUCCUGUUCAUUGC | 313 | GCAAUGAACAGGAAUGGAU | 332-350 | 330 |
| 71 | NUCCAUUCCUGUUCAUUGC | 314 | GCAAUGAACAGGAAUGGAN | 332-350 | 330 |
| 72 | NUCCAUUCCUGUUCAUUGN | 315 | NCAAUGAACAGGAAUGGAN | 332-350 | 330 |
| 73 | UUCCAUUCCUGUUCAUUGC | 316 | GCAAUGAACAGGAAUIGAA | 332-350 | 330 |
| 74 | AUCCAUUCCUGUUCAUUGC | 317 | GCAAUGAACAGGAAUIGAU | 332-350 | 330 |
| 75 | NUCCAUUCCUGUUCAUUGC | 318 | GCAAUGAACAGGAAUIGAN | 332-350 | 330 |
| 76 | NUCCAUUCCUGUUCAUUGN | 319 | NCAAUGAACAGGAAUIGAN | 332-350 | 330 |
| 77 | UCUGUGUUCAGUUUCCAUU | 320 | AAUGGAAACUGAACACAGA | 180-198 | 178 |
| 78 | ACUGUGUUCAGUUUCCAUU | 321 | AAUGGAAACUGAACACAGU | 180-198 | 178 |
| 79 | CCUGUGUUCAGUUUCCAUU | 322 | AAUGGAAACUGAACACAGG | 180-198 | 178 |
| 80 | NCUGUGUUCAGUUUCCAUU | 323 | AAUGGAAACUGAACACAGN | 180-198 | 178 |
| 81 | NCUGUGUUCAGUUUCCAUN | 324 | NAUGGAAACUGAACACAGN | 180-198 | 178 |
| 82 | UCUGUGUUCAGUUUCCAUU | 325 | AAUGGAAACUGAACACAIA | 180-198 | 178 |
| 83 | ACUGUGUUCAGUUUCCAUU | 326 | AAUGGAAACUGAACACAIU | 180-198 | 178 |
| 84 | CCUGUGUUCAGUUUCCAUU | 327 | AAUGGAAACUGAACACAIG | 180-198 | 178 |
| 85 | NCUGUGUUCAGUUUCCAUU | 328 | AAUGGAAACUGAACACAIN | 180-198 | 178 |
| 86 | NCUGUGUUCAGUUUCCAUN | 329 | NAUGGAAACUGAACACAIN | 180-198 | 178 |
| 87 | UUGGCUUCCCAGGAAUCUG | 330 | CAGAUUCCUGGGAAGCCAA | 386-404 | 384 |
| 88 | AUGGCUUCCCAGGAAUCUG | 331 | CAGAUUCCUGGGAAGCCAU | 386-404 | 384 |
| 89 | CUGGCUUCCCAGGAAUCUG | 332 | CAGAUUCCUGGGAAGCCAG | 386-404 | 384 |
| 90 | NUGGCUUCCCAGGAAUCUG | 333 | CAGAUUCCUGGGAAGCCAN | 386-404 | 384 |
| 91 | NUGGCUUCCCAGGAAUCUN | 334 | NAGAUUCCUGGGAAGCCAN | 386-404 | 384 |
| 92 | UUGGCUUCCCAGGAAUCUG | 335 | CAGAUUCCUGGGAAICCAA | 386-404 | 384 |
| 93 | AUGGCUUCCCAGGAAUCUG | 336 | CAGAUUCCUGGGAAICCAU | 386-404 | 384 |
| 94 | CUGGCUUCCCAGGAAUCUG | 337 | CAGAUUCCUGGGAAICCAG | 386-404 | 384 |
| 95 | NUGGCUUCCCAGGAAUCUG | 338 | CAGAUUCCUGGGAAICCAN | 386-404 | 384 |
| 96 | NUGGCUUCCCAGGAAUCUN | 339 | NAGAUUCCUGGGAAICCAN | 386-404 | 384 |
| 97 | ACAAUUUCUGGCUUCCCAG | 340 | CUGGGAAGCCAGAAAUUGU | 393-411 | 391 |
| 98 | UCAAUUUCUGGCUUCCCAG | 341 | CUGGGAAGCCAGAAAUUGA | 393-411 | 391 |
| 99 | NCAAUUUCUGGCUUCCCAG | 342 | CUGGGAAGCCAGAAAUUGN | 393-411 | 391 |
| 100 | NCAAUUUCUGGCUUCCCAN | 343 | NUGGGAAGCCAGAAAUUGN | 393-411 | 391 |
| 101 | UUACACUUCAGCACCAGUG | 344 | CACUGGUGCUGAAGUGUAA | 129-147 | 127 |
| 102 | AUACACUUCAGCACCAGUG | 345 | CACUGGUGCUGAAGUGUAU | 129-147 | 127 |
| 103 | NUACACUUCAGCACCAGUG | 346 | CACUGGUGCUGAAGUGUAN | 129-147 | 127 |
| 104 | NUACACUUCAGCACCAGUN | 347 | NACUGGUGCUGAAGUGUAN | 129-147 | 127 |
| 105 | UACCUUCCAAGCUUCUGUC | 348 | GACAGAAGCUUGGAAGGUA | 202-220 | 200 |
| 106 | GACCUUCCAAGCUUCUGUC | 349 | GACAGAAGCUUGGAAGGUC | 202-220 | 200 |
| 107 | AACCUUCCAAGCUUCUGUC | 350 | GACAGAAGCUUGGAAGGUU | 202-220 | 200 |
| 108 | NACCUUCCAAGCUUCUGUC | 351 | GACAGAAGCUUGGAAGGUN | 202-220 | 200 |
| 109 | NACCUUCCAAGCUUCUGUN | 352 | NACAGAAGCUUGGAAGGUN | 202-220 | 200 |
| 110 | UACCUUCCAAGCUUCUGUC | 353 | GACAGAAGCUUGGAAGIUA | 202-220 | 200 |
| 111 | GACCUUCCAAGCUUCUGUC | 354 | GACAGAAGCUUGGAAGIUC | 202-220 | 200 |
| 112 | AACCUUCCAAGCUUCUGUC | 355 | GACAGAAGCUUGGAAGIUU | 202-220 | 200 |
| 113 | NACCUUCCAAGCUUCUGUC | 356 | GACAGAAGCUUGGAAGIUN | 202-220 | 200 |
| 114 | NACCUUCCAAGCUUCUGUN | 357 | NACAGAAGCUUGGAAGIUN | 202-220 | 200 |
| 115 | UCGGAAAAUCCCCUCAUCC | 358 | GGAUGAGGGGAUUUUCCGA | 307-325 | 305 |
| 116 | CCGGAAAAUCCCCUCAUCC | 359 | GGAUGAGGGGAUUUUCCGG | 307-325 | 305 |
| 117 | ACGGAAAAUCCCCUCAUCC | 360 | GGAUGAGGGGAUUUUCCGU | 307-325 | 305 |
| 118 | NCGGAAAAUCCCCUCAUCC | 361 | GGAUGAGGGGAUUUUCCGN | 307-325 | 305 |
| 119 | NCGGAAAAUCCCCUCAUCN | 362 | NGAUGAGGGGAUUUUCCGN | 307-325 | 305 |
| 120 | UCGGAAAAUCCCCUCAUCC | 363 | GGAUGAGGGGAUUUUCCIA | 307-325 | 305 |
| 121 | CCGGAAAAUCCCCUCAUCC | 364 | GGAUGAGGGGAUUUUCCIG | 307-325 | 305 |
| 122 | ACGGAAAAUCCCCUCAUCC | 365 | GGAUGAGGGGAUUUUCCIU | 307-325 | 305 |
| 123 | NCGGAAAAUCCCCUCAUCC | 366 | GGAUGAGGGGAUUUUCCIN | 307-325 | 305 |
| 124 | NCGGAAAAUCCCCUCAUCN | 367 | NGAUGAGGGGAUUUUCCIN | 307-325 | 305 |
| 125 | UUUCUGGCUUCCCAGGAAU | 368 | AUUCCUGGGAAGCUAGAAA | 389-407 | 387 |
| 126 | AUUCUGGCUUCCCAGGAAU | 369 | AUUCCUGGGAAGCUAGAAU | 389-407 | 387 |
| 127 | NUUCUGGCUUCCCAGGAAU | 370 | AUUCCUGGGAAGCUAGAAN | 389-407 | 387 |
| 128 | NUUCUGGCUUCCCAGGAAN | 371 | NUUCCUGGGAAGCUAGAAN | 389-407 | 387 |
| 129 | UUGAGUUCAGAGGCAGAAU | 372 | AUUCUGCCUCUGAACUCAC | 414-432 | 412 |
| 130 | GUGAGUUCAGAGGCAGAAU | 373 | AUUCUGCCUCUGAACUCAC | 414-432 | 412 |
| 131 | AUGAGUUCAGAGGCAGAAU | 374 | AUUCUGCCUCUGAACUCAU | 414-432 | 412 |
| 132 | NUGAGUUCAGAGGCAGAAU | 375 | AUUCUGCCUCUGAACUCAN | 414-432 | 412 |
| 133 | NUGAGUUCAGAGGCAGAAN | 376 | NUUCUGCCUCUGAACUCAN | 414-432 | 412 |
| 134 | UCUAAGAGUCCCUGCAGGG | 377 | CCCUGCAGGGACUCUUAGA | 481-499 | 479 |
| 135 | ACUAAGAGUCCCUGCAGGG | 378 | CCCUGCAGGGACUCUUAGU | 481-499 | 479 |
| 136 | GCUAAGAGUCCCUGCAGGG | 379 | CCCUGCAGGGACUCUUAGC | 481-499 | 479 |
| 137 | NCUAAGAGUCCCUGCAGGG | 380 | CCCUGCAGGGACUCUUAGN | 481-499 | 479 |
| 138 | NCUAAGAGUCCCUGCAGGN | 381 | NCCUGCAGGGACUCUUAGN | 481-499 | 479 |
| 139 | AGCUAAGAGUCCCUGCAGG | 382 | CCUGCAGGGACUCUUAGCU | 482-500 | 480 |
| 140 | UGCUAAGAGUCCCUGCAGG | 383 | CCUGCAGGGACUCUUAGCA | 482-500 | 480 |
| 141 | NGCUAAGAGUCCCUGCAGG | 384 | CCUGCAGGGACUCUUAGCN | 482-500 | 480 |
| 142 | NGCUAAGAGUCCCUGCAGN | 385 | NCUGCAGGGACUCUUAGCN | 482-500 | 480 |
| 143 | AGCUAAGAGUCCCUGCAGG | 386 | CCUGCAGGGACUCUUAICU | 482-500 | 480 |
| 144 | UGCUAAGAGUCCCUGCAGG | 387 | CCUGCAGGGACUCUUAICA | 482-500 | 480 |
| 145 | NGCUAAGAGUCCCUGCAGG | 388 | CCUGCAGGGACUCUUAICN | 482-500 | 480 |
| 146 | NGCUAAGAGUCCCUGCAGN | 389 | NCUGCAGGGACUCUUAICN | 482-500 | 480 |
| 147 | AAGCUACAGGAGAAGGUGG | 390 | CCACCUUCUCCUGUAGCUU | 642-660 | 640 |
| 148 | UAGCUACAGGAGAAGGUGG | 391 | CCACCUUCUCCUGUAGCUA | 642-660 | 640 |
| 149 | NAGCUACAGGAGAAGGUGG | 392 | CCACCUUCUCCUGUAGCUN | 642-660 | 640 |
| 150 | NAGCUACAGGAGAAGGUGN | 393 | NCACCUUCUCCUGUAGCUN | 642-660 | 640 |
| 151 | AAGCUACAGGAGAAGGUGG | 394 | CCACCUUCUCCUGUAICUU | 642-660 | 640 |
| 152 | UAGCUACAGGAGAAGGUGG | 395 | CCACCUUCUCCUGUAICUA | 642-660 | 640 |
| 153 | NAGCUACAGGAGAAGGUGG | 396 | CCACCUUCUCCUGUAICUN | 642-660 | 640 |
| 154 | NAGCUACAGGAGAAGGUGN | 397 | NCACCUUCUCCUGUAICUN | 642-660 | 640 |
| 155 | UCUGAAGCUACAGGAGAAG | 398 | CUUCUCCUGUAGCUUCAGA | 646-664 | 644 |
| 156 | ACUGAAGCUACAGGAGAAG | 399 | CUUCUCCUGUAGCUUCAGU | 646-664 | 644 |
| 157 | GCUGAAGCUACAGGAGAAG | 400 | CUUCUCCUGUAGCUUCAGC | 646-664 | 644 |
| 158 | NCUGAAGCUACAGGAGAAG | 401 | CUUCUCCUGUAGCUUCAGN | 646-664 | 644 |
| 159 | NCUGAAGCUACAGGAGAAN | 402 | NUUCUCCUGUAGCUUCAGN | 646-664 | 644 |
| 160 | UCUGAAGCUACAGGAGAAG | 403 | CUUCUCCUGUAGCUUCAIA | 646-664 | 644 |
| 161 | ACUGAAGCUACAGGAGAAG | 404 | CUUCUCCUGUAGCUUCAIU | 646-664 | 644 |
| 162 | GCUGAAGCUACAGGAGAAG | 405 | CUUCUCCUGUAGCUUCAIC | 646-664 | 644 |
| 163 | NCUGAAGCUACAGGAGAAG | 406 | CUUCUCCUGUAGCUUCAIN | 646-664 | 644 |
| 164 | NCUGAAGCUACAGGAGAAN | 407 | NUUCUCCUGUAGCUUCAIN | 646-664 | 644 |
| 165 | UACAGACUGAGGACCAGCA | 408 | UGCUGGUCCUCAGUCUGUA | 63-81 | 61 |
| 166 | AACAGACUGAGGACCAGCA | 409 | UGCUGGUCCUCAGUCUGUU | 63-81 | 61 |
| 167 | CACAGACUGAGGACCAGCA | 410 | UGCUGGUCCUCAGUCUGUG | 63-81 | 61 |
| 168 | NACAGACUGAGGACCAGCA | 411 | UGCUGGUCCUCAGUCUGUN | 63-81 | 61 |
| 169 | NACAGACUGAGGACCAGCN | 412 | UGCUGGUCCUCAGUCUGUN | 63-81 | 61 |
| 170 | UACAGACUGAGGACCAGCA | 413 | UGCUGGUCCUCAGUCUIUA | 63-81 | 61 |
| 171 | AACAGACUGAGGACCAGCA | 414 | UGCUGGUCCUCAGUCUIUU | 63-81 | 61 |
| 172 | CACAGACUGAGGACCAGCA | 415 | UGCUGGUCCUCAGUCUIUG | 63-81 | 61 |
| 173 | NACAGACUGAGGACCAGCA | 416 | UGCUGGUCCUCAGUCUIUN | 63-81 | 61 |
| 174 | NACAGACUGAGGACCAGCN | 417 | UGCUGGUCCUCAGUCUIUN | 63-81 | 61 |
| 175 | UCACAGACUGAGGACCAGC | 418 | GCUGGUCCUCAGUCUGUGA | 64-82 | 62 |
| 176 | ACACAGACUGAGGACCAGC | 419 | GCUGGUCCUCAGUCUGUGU | 64-82 | 62 |
| 177 | NCACAGACUGAGGACCAGC | 420 | GCUGGUCCUCAGUCUGUGN | 64-82 | 62 |
| 178 | NCACAGACUGAGGACCAGN | 421 | NCUGGUCCUCAGUCUGUGN | 64-82 | 62 |
| 179 | UCACAGACUGAGGACCAGC | 422 | GCUGGUCCUCAGUCUGUIA | 64-82 | 62 |
| 180 | ACACAGACUGAGGACCAGC | 423 | GCUGGUCCUCAGUCUGUIU | 64-82 | 62 |
| 181 | NCACAGACUGAGGACCAGC | 424 | GCUGGUCCUCAGUCUGUIN | 64-82 | 62 |
| 182 | NCACAGACUGAGGACCAGN | 425 | NCUGGUCCUCAGUCUGUIN | 64-82 | 62 |
| 183 | UCACAGACUGAGGACCAGC | 426 | GCUGGUCCUCAGUCUIUGA | 64-82 | 62 |
| 184 | ACACAGACUGAGGACCAGC | 427 | GCUGGUCCUCAGUCUIUGU | 64-82 | 62 |
| 185 | NCACAGACUGAGGACCAGC | 428 | GCUGGUCCUCAGUCUIUGN | 64-82 | 62 |
| 186 | NCACAGACUGAGGACCAGN | 429 | NCUGGUCCUCAGUCUIUGN | 64-82 | 62 |
| 187 | UGAAUCUGGUAGACACGGA | 430 | UCCGUGUCUACCAGAUUCA | 375-393 | 373 |
| 188 | AGAAUCUGGUAGACACGGA | 431 | UCCGUGUCUACCAGAUUCU | 375-393 | 373 |
| 189 | GGAAUCUGGUAGACACGGA | 432 | UCCGUGUCUACCAGAUUCC | 375-393 | 373 |
| 190 | NGAAUCUGGUAGACACGGA | 433 | UCCGUGUCUACCAGAUUCN | 375-393 | 373 |
| 191 | NGAAUCUGGUAGACACGGN | 434 | NCCGUGUCUACCAGAUUCN | 375-393 | 373 |
| 192 | UGAAUCUGGUAGACACGGA | 435 | UCCGUGUCUACCAIAUUCA | 375-393 | 373 |
| 193 | AGAAUCUGGUAGACACGGA | 436 | UCCGUGUCUACCAIAUUCU | 375-393 | 373 |
| 194 | GGAAUCUGGUAGACACGGA | 437 | UCCGUGUCUACCAIAUUCC | 375-393 | 373 |
| 195 | NGAAUCUGGUAGACACGGA | 438 | UCCGUGUCUACCAIAUUCN | 375-393 | 373 |
| 196 | NGAAUCUGGUAGACACGGN | 439 | NCCGUGUCUACCAIAUUCN | 375-393 | 373 |
| 197 | UAGGAAUCUGGUAGACACG | 440 | CGUGUCUACCAGAUUCCUA | 377-395 | 375 |
| 198 | AAGGAAUCUGGUAGACACG | 441 | CGUGUCUACCAGAUUCCUU | 377-395 | 375 |
| 199 | CAGGAAUCUGGUAGACACG | 442 | CGUGUCUACCAGAUUCCUG | 377-395 | 375 |
| 200 | NAGGAAUCUGGUAGACACG | 443 | CGUGUCUACCAGAUUCCUN | 377-395 | 375 |
| 201 | NAGGAAUCUGGUAGACACN | 444 | NGUGUCUACCAGAUUCCUN | 377-395 | 375 |
| 202 | UAAGCUACAGGAGAAGGUG | 445 | CACCUUCUCCUGUAGCUUA | 643-661 | 641 |
| 203 | AAAGCUACAGGAGAAGGUG | 446 | CACCUUCUCCUGUAGCUUU | 643-661 | 641 |
| 204 | GAAGCUACAGGAGAAGGUG | 447 | CACCUUCUCCUGUAGCUUC | 643-661 | 641 |
| 205 | NAAGCUACAGGAGAAGGUG | 448 | CACCUUCUCCUGUAGCUUN | 643-661 | 641 |
| 206 | NAAGCUACAGGAGAAGGUN | 449 | NACCUUCUCCUGUAGCUUN | 643-661 | 641 |
| 207 | UAAGCUACAGGAGAAGGUG | 450 | CACCUUCUCCUGUAICUUA | 643-661 | 641 |
| 208 | AAAGCUACAGGAGAAGGUG | 451 | CACCUUCUCCUGUAICUUU | 643-661 | 641 |
| 209 | GAAGCUACAGGAGAAGGUG | 452 | CACCUUCUCCUGUAICUUC | 643-661 | 641 |
| 210 | NAAGCUACAGGAGAAGGUG | 453 | CACCUUCUCCUGUAICUUN | 643-661 | 641 |
| 211 | NAAGCUACAGGAGAAGGUN | 454 | NACCUUCUCCUGUAICUUN | 643-661 | 641 |
| 212 | UCAUCCAGUGGAUUUGAGG | 455 | CCUCAAAUCCACUGGAUGA | 830-848 | 828 |
| 213 | ACAUCCAGUGGAUUUGAGG | 456 | CCUCAAAUCCACUGGAUGU | 830-848 | 828 |
| 214 | NCAUCCAGUGGAUUUGAGG | 457 | CCUCAAAUCCACUGGAUGN | 830-848 | 828 |
| 215 | NCAUCCAGUGGAUUUGAGN | 458 | NCUCAAAUCCACUGGAUGN | 830-848 | 828 |
| 216 | UCAUCCAGUGGAUUUGAGG | 459 | CCUCAAAUCCACUIGAUGA | 830-848 | 828 |
| 217 | ACAUCCAGUGGAUUUGAGG | 460 | CCUCAAAUCCACUIGAUGU | 830-848 | 828 |
| 218 | NCAUCCAGUGGAUUUGAGG | 461 | CCUCAAAUCCACUIGAUGN | 830-848 | 828 |
| 219 | NCAUCCAGUGGAUUUGAGN | 462 | NCUCAAAUCCACUIGAUGN | 830-848 | 828 |
| 220 | AGUUCAGAGGCAGAAUCUA | 463 | UAGAUUCUGCCUCUGAACU | 411-429 | 409 |
| 221 | UGUUCAGAGGCAGAAUCUA | 464 | UAGAUUCUGCCUCUGAACA | 411-429 | 409 |
| 222 | NGUUCAGAGGCAGAAUCUA | 465 | UAGAUUCUGCCUCUGAACN | 411-429 | 409 |
| 223 | NGUUCAGAGGCAGAAUCUN | 466 | NAGAUUCUGCCUCUGAACN | 411-429 | 409 |
| 224 | AGUUCAGAGGCAGAAUCUA | 467 | UAGAUUCUGCCUCUIAACU | 411-429 | 409 |
| 225 | UGUUCAGAGGCAGAAUCUA | 468 | UAGAUUCUGCCUCUIAACA | 411-429 | 409 |
| 226 | NGUUCAGAGGCAGAAUCUA | 469 | UAGAUUCUGCCUCUIAACN | 411-429 | 409 |
| 227 | NGUUCAGAGGCAGAAUCUN | 470 | NAGAUUCUGCCUCUIAACN | 411-429 | 409 |
| 228 | UGAGUUCAGAGGCAGAAUC | 471 | GAUUCUGCCUCUGAACUCA | 413-431 | 411 |
| 229 | AGAGUUCAGAGGCAGAAUC | 472 | GAUUCUGCCUCUGAACUCU | 413-431 | 411 |
| 230 | NGAGUUCAGAGGCAGAAUN | 473 | GAUUCUGCCUCUGAACUCN | 413-431 | 411 |
| 231 | NGAGUUCAGAGGCAGAAUN | 474 | NAUUCUGCCUCUGAACUCN | 413-431 | 411 |
| 232 | ACCUUAUUGGGAACACCAG | 475 | CUGGUGUUCCCAAUAAGGU | 435-453 | 433 |
| 233 | UCCUUAUUGGGAACACCAG | 476 | CUGGUGUUCCCAAUAAGGA | 435-453 | 433 |
| 234 | NCCUUAUUGGGAACACCAG | 477 | CUGGUGUUCCCAAUAAGGN | 435-453 | 433 |
| 235 | NCCUUAUUGGGAACACCAN | 478 | NUGGUGUUCCCAAUAAGGN | 435-453 | 433 |
| 236 | UCACCUUAUUGGGAACACC | 479 | GGUGUUCCCAAUAAGGUGA | 437-455 | 435 |
| 237 | ACACCUUAUUGGGAACACC | 480 | GGUGUUCCCAAUAAGGUGU | 437-455 | 435 |
| 238 | CCACCUUAUUGGGAACACC | 481 | GGUGUUCCCAAUAAGGUGG | 437-455 | 435 |
| 239 | NCACCUUAUUGGGAACACC | 482 | GGUGUUCCCAAUAAGGUGN | 437-455 | 435 |
| 240 | NCACCUUAUUGGGAACACN | 483 | NGUGUUCCCAAUAAGGUGN | 437-455 | 435 |
| 241 | UCACCUUAUUGGGAACACC | 484 | GGUGUUCCCAAUAAIGUGA | 437-455 | 435 |
| 242 | ACACCUUAUUGGGAACACC | 485 | GGUGUUCCCAAUAAIGUGU | 437-455 | 435 |
| 243 | CCACCUUAUUGGGAACACC | 486 | GGUGUUCCCAAUAAIGUGG | 437-455 | 435 |
| 244 | NCACCUUAUUGGGAACACC | 487 | GGUGUUCCCAAUAAIGUGN | 437-455 | 435 |
| 245 | NCACCUUAUUGGGAACACN | 488 | NGUGUUCCCAAUAAIGUGN | 437-455 | 435 |
| 246 | UCAUCCAAGUGCCAGCUAA | 489 | UUAGCUGGCACUUGGAUGA | 495-513 | 493 |
| 247 | ACAUCCAAGUGCCAGCUAA | 490 | UUAGCUGGCACUUGGAUGU | 495-513 | 493 |
| 248 | CCAUCCAAGUGCCAGCUAA | 491 | UUAGCUGGCACUUGGAUGG | 495-513 | 493 |
| 249 | NCAUCCAAGUGCCAGCUAA | 492 | UUAGCUGGCACUUGGAUGN | 495-513 | 493 |
| 250 | NCAUCCAAGUGCCAGCUAN | 493 | NUAGCUGGCACUUGGAUGN | 495-513 | 493 |
| 251 | UCAUCCAAGUGCCAGCUAA | 494 | UUAGCUGGCACUUIGAUGA | 495-513 | 493 |
| 252 | ACAUCCAAGUGCCAGCUAA | 495 | UUAGCUGGCACUUIGAUGU | 495-513 | 493 |
| 253 | CCAUCCAAGUGCCAGCUAA | 496 | UUAGCUGGCACUUIGAUGG | 495-513 | 493 |
| 254 | NCAUCCAAGUGCCAGCUAA | 497 | UUAGCUGGCACUUIGAUGN | 495-513 | 493 |
| 255 | NCAUCCAAGUGCCAGCUAN | 498 | NUAGCUGGCACUUIGAUGN | 495-513 | 493 |
| 256 | AGAUACUCCCUUCUCAUUA | 499 | UAAUGAGAAGGGAGUAUCU | 529-547 | 527 |
| 257 | UGAUACUCCCUUCUCAUUA | 500 | UAAUGAGAAGGGAGUAUCA | 529-547 | 527 |
| 258 | NGAUACUCCCUUCUCAUUA | 501 | UAAUGAGAAGGGAGUAUCN | 529-547 | 527 |
| 259 | NGAUACUCCCUUCUCAUUN | 502 | NAAUGAGAAGGGAGUAUCN | 529-547 | 527 |
| 260 | AGAUACUCCCUUCUCAUUA | 503 | UAAUGAGAAGGGAIUAUCU | 529-547 | 527 |
| 261 | UGAUACUCCCUUCUCAUUA | 504 | UAAUGAGAAGGGAIUAUCA | 529-547 | 527 |
| 262 | NGAUACUCCCUUCUCAUUA | 505 | UAAUGAGAAGGGAIUAUCN | 529-547 | 527 |
| 263 | NGAUACUCCCUUCUCAUUN | 506 | NAAUGAGAAGGGAIUAUCN | 529-547 | 527 |
| 264 | UCACAGAUACUCCCUUCUC | 507 | GAGAAGGGAGUAUCUGUGA | 533-551 | 531 |
| 265 | ACACAGAUACUCCCUUCUC | 508 | GAGAAGGGAGUAUCUGUGU | 533-551 | 531 |
| 266 | NCACAGAUACUCCCUUCUC | 509 | GAGAAGGGAGUAUCUGUGN | 533-551 | 531 |
| 267 | NCACAGAUACUCCCUUCUN | 510 | NAGAAGGGAGUAUCUGUGN | 533-551 | 531 |
| 268 | UCACAGAUACUCCCUUCUC | 511 | GAGAAGGGAGUAUCUIUGA | 533-551 | 531 |
| 269 | ACACAGAUACUCCCUUCUC | 512 | GAGAAGGGAGUAUCUIUGU | 533-551 | 531 |
| 270 | NCACAGAUACUCCCUUCUC | 513 | GAGAAGGGAGUAUCUIUGN | 533-551 | 531 |
| 271 | NCACAGAUACUCCCUUCUN | 514 | NAGAAGGGAGUAUCUIUGN | 533-551 | 531 |
| 272 | UGUUCGAUGAUGCUGAUGC | 515 | GCAUCAGCAUCAUCGAACA | 981-999 | 979 |
| 273 | AGUUCGAUGAUGCUGAUGC | 516 | GCAUCAGCAUCAUCGAACU | 981-999 | 979 |
| 274 | GGUUCGAUGAUGCUGAUGC | 517 | GCAUCAGCAUCAUCGAACC | 981-999 | 979 |
| 275 | NGUUCGAUGAUGCUGAUGC | 518 | GCAUCAGCAUCAUCGAACN | 981-999 | 979 |
| 276 | NGUUCGAUGAUGCUGAUGN | 519 | NCAUCAGCAUCAUCGAACN | 981-999 | 979 |
| 277 | UGUUCGAUGAUGCUGAUGC | 520 | GCAUCAGCAUCAUCIAACA | 981-999 | 979 |
| 278 | AGUUCGAUGAUGCUGAUGC | 521 | GCAUCAGCAUCAUCIAACU | 981-999 | 979 |
| 279 | GGUUCGAUGAUGCUGAUGC | 522 | GCAUCAGCAUCAUCIAACC | 981-999 | 979 |
| 280 | NGUUCGAUGAUGCUGAUGC | 523 | GCAUCAGCAUCAUCIAACN | 981-999 | 979 |
| 281 | NGUUCGAUGAUGCUGAUGN | 524 | NCAUCAGCAUCAUCIAACN | 981-999 | 979 |
| 282 | ACCUUUCCAUUCCUGUUCA | 525 | UGAACAGGAAUGGAAAGGU | 336-354 | 334 |
| 283 | UCCUUUCCAUUCCUGUUCA | 526 | UGAACAGGAAUGGAAAGGA | 336-354 | 334 |
| 284 | NCCUUUCCAUUCCUGUUCA | 527 | UGAACAGGAAUGGAAAGGN | 336-354 | 334 |
| 285 | NCCUUUCCAUUCCUGUUCN | 528 | NGAACAGGAAUGGAAAGGN | 336-354 | 334 |
| 286 | AUAGACACGGACUCGGUAG | 529 | CUACCGAGUCCGUGUCUAA | 367-385 | 365 |
| 287 | UUAGACACGGACUCGGUAG | 530 | CUACCGAGUCCGUGUCUAU | 367-385 | 365 |
| 288 | NUAGACACGGACUCGGUAG | 531 | CUACCGAGUCCGUGUCUAN | 367-385 | 365 |
| 289 | NUAGACACGGACUCGGUAN | 532 | NUACCGAGUCCGUGUCUAN | 367-385 | 365 |
| 290 | AACAAUUUCUGGCUUCCCA | 533 | UGGGAAGCCAGAAAUUGUA | 394-412 | 392 |
| 291 | UACAAUUUCUGGCUUCCCA | 534 | UGGGAAGCCAGAAAUUGUU | 394-412 | 392 |
| 292 | NACAAUUUCUGGCUUCCCA | 535 | UGGGAAGCCAGAAAUUGUN | 394-412 | 392 |
| 293 | NACAAUUUCUGGCUUCCCN | 536 | NGGGAAGCCAGAAAUUGUN | 394-412 | 392 |
| 294 | AUACUCCCUUCUCAUUAGG | 537 | CCUAAUGAGAAGGGAGUAA | 527-545 | 525 |
| 295 | UUACUCCCUUCUCAUUAGG | 538 | CCUAAUGAGAAGGGAGUAU | 527-545 | 525 |
| 296 | NUACUCCCUUCUCAUUAGG | 539 | CCUAAUGAGAAGGGAGUAN | 527-545 | 525 |
| 297 | NUACUCCCUUCUCAUUAGN | 540 | NCUAAUGAGAAGGGAGUAN | 527-545 | 525 |

[0138] The RAGE RNAi agent sense strands and antisense strands that comprise or consist of the nucleotide sequences in Table 2 can be modified nucleotides or unmodified nucleotides. In some embodiments, the RAGE RNAi agents having the sense and antisense strand sequences that comprise or consist of any of the nucleotide sequences in Table 2 are all or substantially all modified nucleotides.

[0139] In some embodiments, the antisense strand of a RAGE RNAi agent disclosed herein differs by 0, 1, 2, or 3 nucleotides from any of the antisense strand sequences in Table 2. In some embodiments, the sense strand of a RAGE RNAi agent disclosed herein differs by 0, 1, 2, or 3 nucleotides from any of the sense strand sequences in Table 2.

[0140] In some embodiments, the antisense strand of a RAGE RNAi agent disclosed comprises at least 15 contiguous nucleotides differing by 0, 1, 2, or 3 nucleotides from any of the antisense strand sequences in Table 2. In some embodiments, the sense strand of a RAGE RNAi agent disclosed herein comprises at least 15 contiguous nucleotides differing by 0, 1, 2, or 3 nucleotides from any of the sense strand sequences in Table 2.

[0141] As used herein, each N listed in a sequence disclosed in Table 2 may be independently selected from any and all nucleobases (including those found on both modified and unmodified nucleotides). In some embodiments, an N nucleotide listed in a sequence disclosed in Table 2 has a nucleobase that is complementary to the N nucleotide at the corresponding position on the other strand. In some embodiments, an N nucleotide listed in a sequence disclosed in Table 2 has a nucleobase that is not complementary to the N nucleotide at the corresponding position on the other strand. In some embodiments, an N nucleotide listed in a sequence disclosed in Table 2 has a nucleobase that is the same as the N nucleotide at the corresponding position on the other strand. In some embodiments, an N nucleotide listed in a sequence disclosed in Table 2 has a nucleobase that is different from the N nucleotide at the corresponding position on the other strand.

[0142] Certain modified RAGE RNAi agent sense and antisense strands are provided in Table 3, Table 4, Table 5, Table 6, and Table 10. Certain modified RAGE RNAi agent antisense strands, as well as their underlying unmodified nucleobase sequences, are provided in Table 3. Certain modified RAGE RNAi agent sense strands, as well as their underlying unmodified nucleobase sequences, are provided in Tables 4, 5, and 6. In forming RAGE RNAi agents, each of the nucleotides in each of the underlying base sequences listed in Tables 3, 4, 5, and 6, as well as in Table 2, above, can be a modified nucleotide.

[0143] The RAGE RNAi agents described herein are formed by annealing an antisense strand with a sense strand. A sense strand containing a sequence listed in Table 2, Table 4, Table 5, or Table 6 can be hybridized to any antisense strand containing a sequence listed in Table 2 or Table 3, provided the two sequences have a region of at least 85% complementarity over a contiguous 16, 17, 18, 19, 20, or 21 nucleotide sequence.

[0144] In some embodiments, a RAGE RNAi agent antisense strand comprises a nucleotide sequence of any of the sequences in Table 2 or Table 3.

[0145] In some embodiments, a RAGE RNAi agent comprises or consists of a duplex having the nucleobase sequences of the sense strand and the antisense strand of any of the sequences in Table 2, Table 3, Table 4, Table 5, Table 6, or Table 10.

[0146] Examples of antisense strands containing modified nucleotides are provided in Table 3. Examples of sense strands containing modified nucleotides are provided in Tables 4, 5 and 6.

[0147] As used in Tables 3, 4, 5, 6, and 10, the following notations are used to indicate modified nucleotides, targeting groups, and linking groups:
[0148] A=adenosine-3′-phosphate
[0149] C=cytidine-3′-phosphate
[0150] G=guanosine-3′-phosphate
[0151] U=uridine-3′-phosphate
[0152] I=inosine-3′-phosphate
[0153] a=2′-O-methyladenosine-3′-phosphate
[0154] as=2′-O-methyladenosine-3′-phosphorothioate
[0155] c=2′-O-methylcytidine-3′-phosphate
[0156] cs=2′-O-methylcytidine-3′-phosphorothioate
[0157] g=2′-O-methylguanosine-3′-phosphate
[0158] gs=2′-O-methylguanosine-3′-phosphorothioate
[0159] i=2′-O-methylinosine-3′-phosphate
[0160] is==2′-O-methylinosine-3′-phosphorothioate
[0161] t=2′-O-methyl-5-methyluridine-3′-phosphate
[0162] ts=2′-O-methyl-5-methyluridine-3′-phosphorothioate
[0163] u=2′-O-methyluridine-3′-phosphate
[0164] us=2′-O-methyluridine-3′-phosphorothioate
[0165] Af=2′-fluoroadenosine-3′-phosphate
[0166] Afs=2′-fluoroadenosine-3′-phosporothioate
[0167] Cf=2′-fluorocytidine-3′-phosphate
[0168] Cfs=2′-fluorocytidine-3′-phosphorothioate
[0169] Gf=2′-fluoroguanosine-3′-phosphate
[0170] Gfs=2′-fluoroguanosine-3′-phosphorothioate
[0171] Tf=2′-fluoro-5′-methyluridine-3′-phosphate
[0172] Tfs=2′-fluoro-5′-methyluridine-3′-phosphorothioate
[0173] Uf=2′-fluorouridine-3′-phosphate
[0174] Ufs=2′-fluorouridine-3′-phosphorothioate
[0175] dT=2′-deoxythymidine-3′-phosphate
[0176] A_{UNA}=2′,3′-seco-adenosine-3′-phosphate
[0177] A_{UNA}s=2′,3′-seco-adenosine-3′-phosphorothioate
[0178] C_{UNA}=2′,3′-seco-cytidine-3′-phosphate
[0179] C_{UNA}s=2′,3′-seco-cytidine-3′-phosphorothioate
[0180] G_{UNA}=2′,3′-seco-guanosine-3′-phosphate
[0181] G_{UNA}s=2′,3′-seco-guanosine-3′-phosphorothioate
[0182] U_{UNA}=2′,3′-seco-uridine-3′-phosphate
[0183] U_{UNA}s=2′,3′-seco-uridine-3′-phosphorothioate
[0184] a_2N=see Table 11
[0185] a_2Ns=see Table 11
[0186] (invAb)=inverted abasic deoxyribonucleotide-5′-phosphate, see Table 11
[0187] (invAb)s=inverted abasic deoxyribonucleotide-5′-phosphorothioate, see Table 11
[0188] s=phosphorothioate linkage
[0189] p=terminal phosphate (as synthesized)
[0190] vpdN=vinyl phosphonate deoxyribonucleotide
[0191] cPrpa=5′-cyclopropyl phosphonate-2′-O-methyladenosine-3′-phosphate (see Table 11)
[0192] cPrpas=5′-cyclopropyl phosphonate-2′-O-methyladenosine-3′-phosphorothioate (see Table 11)
[0193] cPrpu=5′-cyclopropyl phosphonate-2′-O-methyluridine-3′-phosphate (see Table 11)
[0194] cPrpus=5′-cyclopropyl phosphonate-2′-O-methyluridine-3′-phosphorothioate (see Table 11)
[0195] (Alk-SS-C6)=see Table 11
[0196] (C6-SS-Alk)=see Table 11
[0197] (C6-SS-C6)=see Table 11
[0198] (6-SS-6)=see Table 11
[0199] (C6-SS-Alk-Me)=see Table 11
[0200] (NH2-C6)=see Table 11
[0201] (TriAlk14)=see Table 11
[0202] (TriAlk14)s=see Table 11
[0203] -C6-=see Table 11
[0204] -C6s-=see Table 11
[0205] -L6-C6-=see Table 11
[0206] -L6-C6s-=see Table 11
[0207] -Alk-cyHex-=see Table 11
[0208] -Alk-cyHexs-=see Table 11
[0209] (TA14)=see Table 11 (structure of (TriAlk14) s after conjugation)
[0210] (TA14)s=see Table 11 (structure of (TriAlk14) s after conjugation)

[0211] As the person of ordinary skill in the art would readily understand, unless otherwise indicated by the sequence (such as, for example, by a phosphorothioate linkage “s”), when present in an oligonucleotide, the nucleotide monomers are mutually linked by 5′-3′-phosphodiester bonds. As the person of ordinary skill in the art would clearly understand, the inclusion of a phosphorothioate linkage as shown in the modified nucleotide sequences disclosed herein replaces the phosphodiester linkage typically present in oligonucleotides. Further, the person of ordinary skill in the art would readily understand that the terminal nucleotide at the 3′ end of a given oligonucleotide sequence would typically have a hydroxyl (—OH) group at the respective 3′ position of the given monomer instead of a phosphate moiety ex vivo. Additionally, for the embodiments disclosed herein, when viewing the respective strand 5′→3′, the inverted abasic residues are inserted such that the 3′ position of the deoxyribose is linked at the 3′ end of the preceding monomer on the respective strand (see, e.g., Table 11). Moreover, as the person of ordinary skill would readily understand and appreciate, while the phosphorothioate chemical structures depicted herein typically show the anion on the sulfur atom, the inventions disclosed herein encompass all phosphorothioate tautomers (e.g., where the sulfur atom has a double-bond and the anion is on an oxygen atom). Unless expressly indicated otherwise herein, such understandings of the person of ordinary skill in the art are used when describing the RAGE RNAi agents and compositions of RAGE RNAi agents disclosed herein.

[0212] Certain examples of targeting groups and linking groups used with the RAGE RNAi agents disclosed herein are included in the chemical structures provided below in Table 11. Each sense strand and/or antisense strand can have any targeting groups or linking groups listed herein, as well as other targeting or linking groups, conjugated to the 5′ and/or 3′ end of the sequence.

TABLE 3
RAGE RNAi Agent Antisense Strand Sequences

| | | | Underlying Base Sequence | |
|---|---|---|---|---|
| | | SEQ | (5′→3′) (Shown as an | SEQ |
| AS | | ID | Unmodified Nucleotide | ID |
| Strand ID | Modified Antisense Strand (5′→3′) | NO. | Sequence) | NO. |
| AM10308-AS | usUfsgsUfgUfuCfaGfuUfuCfcAfuUfeCfsg | 2 | UUGUGUUCAGUUUCCAUUCCG | 7 |
| AM10309-AS | cPrpusUfsgsUfgUfuCfaGfuUfuCfcAfuUfcCfsg | 3 | UUGUGUUCAGUUUCCAUUCCG | 7 |
| AMI0311-AS | usCfsusGfuGfuUfcAfgUfuUfcCfaUfuCfsc | 543 | UCUGUGUUCAGUUUCCAUUCC | 801 |
| AM10312-AS | cPrpusCfsusGfuGfuUfcAfgUfuUfcCfaUfuCfsc | 544 | UCUGUGUUCAGUUUCCAUUCC | 801 |
| AM10314-AS | usUfsgsGfcUfuCfcCfaGfgAfaUfcUfgGfsu | 545 | UUGGCUUCCCAGGAAUCUGGU | 802 |
| AM10315-AS | cPrpusUfsgsGfcUfuCfcCfaGfgAfaUfcUfgGfsu | 546 | UUGGCUUCCCAGGAAUCUGGU | 802 |
| AM10317-AS | asCfsasAfuUfuCfuGfgCfuUfcCfcAfgGfsa | 547 | ACAAUUUCUGGCUUCCCAGGA | 803 |
| AM10318-AS | cPrpasCfsasAfuUfuCfuGfgCfuUfcCfcAfgGfsa | 548 | ACAAUUUCUGGCUUCCCAGGA | 803 |
| AM10467-AS | usUfsasCfaCfuUfcAfgCfaCfcAfgUfgGfsc | 549 | UUACACUUCAGCACCAGUGGC | 804 |
| AM10469-AS | usAfscsCfuUfcCfaAfgCfuUfcUfgUfcCfsg | 550 | UACCUUCCAAGCUUCUGUCCG | 805 |
| AM10471-AS | usCfsgsGfaAfaAfuCfcCfcUfcAfuCfcUfsg | 551 | UCGGAAAAUCCCCUCAUCCUG | 806 |
| AM10473-AS | usUfsusCfuGfgCfuUfcCfcAfgGfaAfuCfsu | 552 | UUUCUGGCUUCCCAGGAAUCU | 807 |
| AM10475-AS | usUfsgsAfgUfuCfaGfaGfgCfaGfaAfuCfsu | 553 | UUGAGUUCAGAGGCAGAAUCU | 808 |
| AM10477-AS | usCfsusAfaGfaGfuCfcCfuGfcAfgGfgUfsa | 554 | UCUAAGAGUCCCUGCAGGGUA | 809 |
| AM10479-AS | asGfscsUfaAfgAfgUfcCfcUfgCfaGfgGfsu | 555 | AGCUAAGAGUCCCUGCAGGGU | 810 |
| AM10481-AS | asAfsgsCfuAfcAfgGfaGfaAfgGfuGfgGfsa | 556 | AAGCUACAGGAGAAGGUGGGA | 811 |
| AM10483-AS | usCfsusGfaAfgCfuAfcAfgGfaGfaAfgGfsu | 557 | UCUGAAGCUACAGGAGAAGGU | 812 |
| AM10571-AS | usAfscsAfgAfcUfgAfgGfaCfcAfgCfaCfsc | 558 | UACAGACUGAGGACCAGCACC | 813 |
| AM10573-AS | usAfscsAfgAfC_{UNA}UfgAfgGfaCfcAfgCfaCfsc | 559 | UACAGACUGAGGACCAGCACC | 813 |
| AM10575-AS | usCfsasCfaGfaCfuGfaGfgAfcCfaGfcAfsc | 560 | UCACAGACUGAGGACCAGCAC | 814 |
| AM10717-AS | usUfsgsUfgUfuCfaGfuUfuCfcAfuUfcCfsc | 561 | UUGUGUUCAGUUUCCAUUCCG | 815 |
| AM10720-AS | usUfsgsUfgUfU_{UNA}CfaGfuUfuCfcAfuUfcCfsg | 562 | UUGUGUUCAGUUUCCAUUCCG | 7 |
| AM10722-AS | usUfsgsUfgUfucaguUfuCfcAfuUfcCfsg | 563 | UUGUGUUCAGUUUCCAUUCCG | 7 |
| AM10723-AS | usUfsgsuguucaguUfuCfcAfuuccsg | 564 | UUGUGUUCAGUUUCCAUUCCG | 7 |
| AM10724-AS | usUfsgsuguucaGfuUfuCfcAfuuccsg | 565 | UUGUGUUCAGUUUCCAUUCCG | 7 |
| AM10752-AS | usGfsasUfgUfuUfuGfaGfcAfcCfuAfcUfsc | 566 | UGAUGUUUUGAGCACCUACUC | 9 |
| AM10754-AS | usUfscsCfaUfuCfcUfgUfuCfaUfuGfcCfsu | 4 | UUCCAUUCCUGUUCAUUGCCU | 8 |
| AM10756-AS | usGfsasAfuCfuGfgUfaGfaCfaCfgGfaCfsu | 568 | UGAAUCUGGUAGACACGGACU | 818 |
| AM10758-AS | usAfsgsGfaAfuCfuGfgUfaGfaCfaCfgGfsa | 569 | UAGGAAUCUGGUAGACACGGA | 819 |
| AM10760-AS | usAfsasGfcUfaCfaGfgAfgAfaGfgUfgGfsg | 570 | UAAGCUACAGGAGAAGGUGGG | 820 |
| AM10762-AS | usCfsasUfcCfaGfuGfgAfuUfuGfaGfgAfsg | 571 | UCAUCCAGUGGAUUUGAGGAG | 821 |
| AM10774-AS | asGfsusUfcAfgAfgGfcAfgAfaUfcUfaCfsc | 572 | AGUUCAGAGGCAGAAUCUACC | 822 |
| AM10776-AS | usGfsasGfuUfC_{UNA}AfgAfgGfcAfgAfaUfcUfsa | 573 | UGAGUUCAGAGGCAGAAUCUA | 823 |
| AM10778-AS | asCfscsUfuAfuUfgGfgAfaCfaCfcAfgCfsc | 574 | ACCUUAUUGGGAACACCAGCC | 824 |
| AM10780-AS | usCfsasCfcUfuAfuUfgGfgAfaCfaCfcAfsg | 575 | UCACCUUAUUGGGAACACCAG | 825 |
| AM10782-AS | usCfsasUfcCfaAfgUfgCfcAfgCfuAfaGfsc | 576 | UCAUCCAAGUGCCAGCUAAGC | 826 |
| AM10784-AS | asGfsasUfaCfuCfcCfuUfcUfcAfuUfaGfsg | 577 | AGAUACUCCCUUCUCAUUAGG | 827 |
| AM10786-AS | usCfsasCfaGfaUfaCfuCfcCfuUfcUfcAfsc | 578 | UCACAGAUACUCCCUUCUCAC | 828 |
| AM10788-AS | usGfsusUfcGfaUfgAfuGfcUfgAfuGfcUfsg | 579 | UGUUCGAUGAUGCUGAUGCUG | 829 |
| AM11103-AS | cPrpusUfgUfgUfuCfaGfuUfuCfcAfuUfcCfsg | 580 | UUGUGUUCAGUUUCCAUUCCG | 7 |
| AM11104-AS | cPrpuUfgUfgUfuCfaGfuUfuCfcAfuUfcCfsg | 581 | UUGUGUUCAGUUUCCAUUCCG | 7 |
| AM11188-AS | cPrpusUfsgsuguucaguUfuCfcAfuuccsg | 582 | UUGUGUUCAGUUUCCAUUCCG | 7 |
| AM11190-AS | usUfsgsuguuC_{UNA}aguUfuCfcAfuuccsg | 583 | UUGUGUUCAGUUUCCAUUCCG | 7 |
| AMI1191-AS | usUfsgsuguU_{UNA}caguUfuCfcAfuuccsg | 584 | UUGUGUUCAGUUUCCAUUCCG | 7 |
| AM11192-AS | usUfsgsugU_{UNA}UcaguUfuCfcAfuuccsg | 585 | UUGUGUUCAGUUUCCAUUCCG | 7 |
| AM11194-AS | usUfsgsuguucaguUfuCfcAfuuccsc | 586 | UUGUGUUCAGUUUCCAUUCCG | 815 |
| AM11196-AS | usUfsgsuguucaguUfuCfcAfuuccsa | 587 | UUGUGUUCAGUUUCCAUUCCA | 830 |
| AM11757-AS | cPrpuUfguguucaguUfuCfcAfuuccsg | 588 | UUGUGUUCAGUUUCCAUUCCG | 7 |
| AM11758-AS | cPrpuUfguguU_{UNA}caguUfuCfcAfuuccsg | 589 | UUGUGUUCAGUUUCCAUUCCG | 7 |
| AM11759-AS | cPrpuUfguguucaguUfuCfcAfuuccsc | 590 | UUGUGUUCAGUUUCCAUUCCG | 815 |
| AM11760-AS | cPrpuUfguguU_{UNA}caguUfuCfcAfuuccsc | 591 | UUGUGUUCAGUUUCCAUUCCG | 815 |
| AM11761-AS | usUfsgsuguU_{UNA}caguUfuCfcAfuuccsc | 592 | UUGUGUUCAGUUUCCAUUCCG | 815 |
| AM11762-AS | cPrpusUfsgsuguU_{UNA}caguUfuCfcAfuuccsg | 593 | UUGUGUUCAGUUUCCAUUCCG | 7 |
| AM11763-AS | cPrpusUfsgsuguucaguUfuCfcAfuuccsc | 594 | UUGUGUUCAGUUUCCAUUCCC | 815 |
| AM11764-AS | cPrpusUfsgsuguU_{UNA}caguUfuCfcAfuuccsc | 595 | UUGUGUUCAGUUUCCAUUCCG | 815 |
| AM11889-AS | usCfscsUfuUfcCfaUfuCfcUfgUfuCfaUfsc | 596 | UCCUUUCCAUUCCUGUUCAUC | 831 |
| AMI1892-AS | usUfsasGfaCfaCfgGfaCfuCfgGfuAfgUfsc | 597 | UUAGACACGGACUCGGUAGUC | 832 |
| AM11894-AS | asUfsasCfuCfcCfuUfcUfcAfuUfaGfgCfsa | 598 | AUACUCCCUUCUCAUUAGGCA | 833 |
| AM11895-AS | cPrpusGfsasUfgUfuUfuGfaGfcAfcCfuAfcUfsc | 599 | UGAUGUUUUGAGCACCUACUC | 9 |
| AM11897-AS | usGfsasuguuuugaGfcAfcCfuacusc | 5 | UGAUGUUUUGAGCACCUACUC | 9 |
| AM11898-AS | cPrpusGfsasuguuuugaGfcAfcCfuacusc | 6 | UGAUGUUUUGAGCACCUACUC | 9 |
| AM12234-AS | cPrpusUfscsCfaUfuCfcUfgUfuCfaUfuGfcCfsu | 602 | UUCCAUUCCUGUUCAUUGCCU | 8 |
| AM12236-AS | usUfscscauuccugUfuCfaUfugccsu | 603 | UUCCAUUCCUGUUCAUUGCCU | 8 |
| AM12237-AS | cPrpusUfscscauuccugUfuCfaUfugccsu | 604 | UUCCAUUCCUGUUCAUUGCCU | 8 |
| AM12240-AS | usUfscscauU_{UNA}CCugUfuCfaUfugccsu | 605 | UUCCAUUCCUGUUCAUUGCCU | 8 |
| AM12241-AS | usUfscscaU_{UNA}UccugUfuCfaUfugccsu | 606 | UUCCAUUCCUGUUCAUUGCCU | 8 |
| AM12245-AS | usUfscscauuccugUfuCfaUfugccsc | 607 | UUCCAUUCCUGUUCAUUGCCC | 834 |
| AM12593-AS | usGfsasuguuuugaGfcAfcCfuacusg | 608 | UGAUGUUUUGAGCACCUACUG | 835 |
| AM12594-AS | usGfsasuguU_{UNA}UugaGfcAfcCfuacusc | 609 | UGAUGUUUUGAGCACCUACUC | 9 |
| AM12596-AS | usGfsasuguuuugaGfcAfcCfuacusa | 610 | UGAUGUUUUGAGCACCUACUA | 836 |
| AM12755-AS | usUfscsCfaUfuccugUfuCfaUfuGfccsu | 611 | UUCCAUUCCUGUUCAUUGCCU | 8 |
| AM12756-AS | cPrpusUfscsCfaUfuccugUfuCfaUfuGfccsu | 612 | UUCCAUUCCUGUUCAUUGCCU | 8 |
| AM12757-AS | cPrpuUfcCfaUfuccugUfuCfaUfuGfccsu | 613 | UUCCAUUCCUGUUCAUUGCCU | 8 |
| AM14090-AS | usUfsgsUfguucaguUfuCfcAfuuccsg | 614 | UUGUGUUCAGUUUCCAUUCCG | 7 |
| AM14091-AS | usUfsgsuguUfcaguUfuCfcAfuuccsg | 615 | UUGUGUUCAGUUUCCAUUCCG | 7 |
| AM14093-AS | usGfsasUfguuuugaGfcAfcCfuacusc | 616 | UGAUGUUUUGAGCACCUACUC | 9 |
| AM14094-AS | usGfsasuguuuugaGfcAfcCfuAfcusc | 617 | UGAUGUUUUGAGCACCUACUC | 9 |
| AM14095-AS | usGfsasuguUfuugaGfcAfcCfuacusc | 618 | UGAUGUUUUGAGCACCUACUC | 9 |
| AMI5021-AS | cPrpusUfsgsuguucaguUfuCfcAfuuccsa | 619 | UUGUGUUCAGUUUCCAUUCCA | 830 |
| AM15767-AS | cPrpusAfscsAfaUfuucugGfcUfuCfcCfagsg | 620 | UACAAUUUCUGGCUUCCCAGG | 837 |
| AM15770-AS | cPrpusCfsusGfuGfuucagUfuUfcCfaUfucsc | 621 | UCUGUGUUCAGUUUCCAUUCC | 801 |

TABLE 4
RAGE RNAi Agent Sense Strand Sequences (Shown Without Linkers, Conjugated Targeting Ligands,
or Capping Moieties)

| | | SEQ | Underlying Base Sequence (5′→3′) | SEQ |
|---|---|---|---|---|
| | Modified Sense Strand | ID | (Shown as an Unmodified | ID |
| Strand ID | (5′→3′) | NO. | Nucleotide Sequence) | NO. |
| AM10307-SS-NL | csggaauggAfAfAfcugaacacaa | 13 | CGGAAUGGAAACUGAACACAA | 19 |
| AM10310-SS-NL | gsgaauggaAfAfCfugaacacaia | 623 | GGAAUGGAAACUGAACACAIA | 839 |
| AM10313-SS-NL | asccagauuCfCfUfgggaaiccaa | 624 | ACCAGAUUCCUGGGAAICCAA | 840 |
| AM10316-SS-NL | usccugggaAfGfCfcagaaauugu | 625 | UCCUGGGAAGCCAGAAAUUGU | 841 |
| AM10466-SS-NL | gsccacuggUfGfCfugaaguguaa | 626 | GCCACUGGUGCUGAAGUGUAA | 842 |
| AM10468-SS-NL | csggacagaAfGfCfuuggaagiua | 627 | CGGACAGAAGCUUGGAAGIUA | 843 |
| AM10470-SS-NL | csaggaugaGfGfGfgauuuuccia | 628 | CAGGAUGAGGGGAUUUUCCIA | 844 |
| AM10472-SS-NL | asgauuccuGfGfGfaagcuagaaa | 629 | AGAUUCCUGGGAAGCUAGAAA | 845 |
| AM10474-SS-NL | a_2NsgauucugCfCfUfcugaacucaa | 630 | (A^{2N})GAUUCUGCCUCUGAACUCAA | 846 |
| AM10476-SS-NL | usacccugcAfGfGfgacucuuaga | 631 | UACCCUGCAGGGACUCUUAGA | 847 |
| AM10478-SS-NL | ascccugcaGfGfGfacucuuaicu | 632 | ACCCUGCAGGGACUCUUAICU | 848 |
| AM10480-SS-NL | uscccaccuUfCfUfccuguaicuu | 633 | UCCCACCUUCUCCUGUAICUU | 849 |
| AM10482-SS-NL | asccuucucCfUfGfuagcuucaia | 634 | ACCUUCUCCUGUAGCUUCAIA | 850 |
| AM10570-SS-NL | gsgugcuggUfCfCfucagucuiua | 635 | GGUGCUGGUCCUCAGUCUIUA | 851 |
| AM10572-SS-NL | gsgugcuggUfCfCfucagucugua | 636 | GGUGCUGGUCCUCAGUCUGUA | 852 |
| AM10574-SS-NL | gsugcugguCfCfUfcagucuguia | 637 | GUGCUGGUCCUCAGUCUGUIA | 853 |
| AM10576-SS-NL | gsugcugguCfCfUfcagucuiuga | 638 | GUGCUGGUCCUCAGUCUIUGA | 854 |
| AM10644-SS-NL | csggaauggAfAfAfcugaacacaa | 13 | CGGAAUGGAAACUGAACACAA | 19 |
| AM10716-SS-NL | gsggaauggAfAfAfcugaacacaa | 640 | GGGAAUGGAAACUGAACACAA | 855 |
| AM10718-SS-NL | csggaauggAfAfAfcuiaacacaa | 641 | CGGAAUGGAAACUIAACACAA | 856 |
| AM10719-SS-NL | csggaauggAfa_2NAfcuiaacacaa | 642 | CGGAAUGGA(A^{2N})ACUIAACACAA | 857 |
| AM10721-SS-NL | csggaauggAfAfAfcugaauacaa | 643 | CGGAAUGGAAACUGAACACAA | 858 |
| AM10725-SS-NL | csggaauGfgAfaAfcugaacacaa | 644 | CGGAAUGGAAACUGAACACAA | 19 |
| AM10737-SS-NL | usccugggaAfGfCfcagaaauugu | 645 | UCCUGGGAAGCCAGAAAUUGU | 841 |
| AM10751-SS-NL | gsaguagguGfCfUfcaaaacauca | 646 | GAGUAGGUGCUCAAAACAUCA | 20 |
| AM10753-SS-NL | asggcaaugAfAfCfaggaauigaa | 15 | AGGCAAUGAACAGGAAUIGAA | 21 |
| AM10755-SS-NL | asguccgugUfCfUfaccaiauuca | 648 | AGUCCGUGUCUACCAIAUUCA | 861 |
| AM10757-SS-NL | usccgugucUfAfCfcagauuccua | 649 | UCCGUGUCUACCAGAUUCCUA | 862 |
| AM10759-SS-NL | csccaccuuCfUfCfcuguaicuua | 650 | CCCACCUUCUCCUGUAICUUA | 863 |
| AM10761-SS-NL | csuccucaaAfUfCfcacuigauga | 651 | CUCCUCAAAUCCACUIGAUGA | 864 |
| AM10773-SS-NL | gsguagauuCfUfGfccucuiaacu | 652 | GGUAGAUUCUGCCUCUIAACU | 865 |
| AM10775-SS-NL | usagauucuGfCfCfucugaacuca | 653 | UAGAUUCUGCCUCUGAACUCA | 866 |
| AM10777-SS-NL | gsgcuggugUfUfCfccaauaaggu | 654 | GGCUGGUGUUCCCAAUAAGGU | 867 |
| AM10779-SS-NL | csugguguuCfCfCfaauaagiuga | 655 | CUGGUGUUCCCAAUAAGIUGA | 868 |
| AM10781-SS-NL | gscuuagcuGfGfCfacuuigauga | 656 | GCUUAGCUGGCACUUIGAUGA | 869 |
| AM10783-SS-NL | cscuaaugaGfAfAfgggaiuaucu | 657 | CCUAAUGAGAAGGGAIUAUCU | 870 |
| AM10785-SS-NL | gsugagaagGfGfAfguaucuiuga | 658 | GUGAGAAGGGAGUAUCUIUGA | 871 |
| AM10787-SS-NL | csagcaucaGfCfAfucauciaaca | 659 | CAGCAUCAGCAUCAUCIAACA | 872 |
| AM11105-SS-NL | cggaauggAfAfAfcugaacacaa | 660 | CGGAAUGGAAACUGAACACAA | 19 |
| AM11106-SS-NL | csggaauggAfAfAfcugaacacaa | 13 | CGGAAUGGAAACUGAACACAA | 19 |
| AM11107-SS-NL | cggaauggAfAfAfcugaacacaa | 662 | CGGAAUGGAAACUGAACACAA | 19 |
| AM11189-SS-NL | csggaauGfgAfaAfcugaauacaa | 663 | CGGAAUGGAAACUGAACACAA | 858 |
| AM11193-SS-NL | gsggaauGfgAfaAfcugaacacaa | 664 | GGGAACGGAAACCGAACACAA | 855 |
| AM11195-SS_NL | usggaauGfgAfaAfcugaacacaa | 665 | CGGAAUGGAAACUGAACACAA | 873 |
| AM11197-SS-NL | csggaauGfgAfa_2NAfcugaacacaa | 666 | CGGAAUGGA(A^{2N})ACUGAACACAA | 874 |
| AM11512-SS-NL | cggaauggAfAfAfcugaacacaa | 667 | CGGAAUGGAAACUGAACACAA | 19 |
| AM11513-SS-NL | csggaauggAfAfAfcugaacacaa | 13 | CGGAAUGGAAACUGAACACAA | 19 |
| AM11514-SS-NL | csggaauggAfAfAfcugaacacaa | 13 | CGGAAUGGAAACUGAACACAA | 19 |
| AM11515-SS-NL | cggaauggAfAfAfcugaacacaa | 670 | CGGAAUGGAAACUGAACACAA | 19 |
| AM11516-SS-NL | csggaauggAfAfAfcugaacacaa | 13 | CGGAAUGGAAACUGAACACAA | 19 |
| AM11517-SS-NL | cggaauggAfAfAfcugaacacaa | 672 | CGGAAUGGAAACUGAACACAA | 19 |
| AM11888-SS-NL | gsaugaacaGfGfAfauggaaagga | 673 | GAUGAACAGGAAUGGAAAGGA | 875 |
| AM11890-SS-NL | gsaugaacaGfGfAfauggaaagia | 674 | GAUGAACAGGAAUGGAAAGIA | 876 |
| AM11891-SS-NL | gsacuaccgAfGfUfccgugucuaa | 675 | GACUACCGAGUCCGUGUCUAA | 877 |
| AM11893-SS-NL | usgccuaauGfAfGfaagggaguau | 676 | UGCCUAAUGAGAAGGGAGUAU | 878 |
| AM11896-SS-NL | gsaguagguGfcUfcAfaaacauca | 677 | GAGUAGGUGCUCAAAACAUCA | 20 |
| AM11899-SS-NL | gsaguagiuGfcUfcAfaaacauca | 678 | GAGUAGIUGCUCAAAACAUCA | 879 |
| AM11900-SS-NL | gsaguagGfuGfcUfcaaaacauca | 14 | GAGUAGGUGCUCAAAACAUCA | 20 |
| AM11901-SS-NL | gsaguagguGfcUfcaaaacauca | 680 | GAGUAGGUGCUCAAAACAUCA | 20 |
| AM12235-SS-NL | asggcaaUfgAfaCfaggaauigaa | 681 | AGGCAAUGAACAGGAAUIGAA | 21 |
| AM12238-SS-NL | asggcaaUfgAfaCfaggaauggaa | 682 | AGGCAAUGAACAGGAAUGGAA | 880 |
| AM12239-SS-NL | asggcaaUfgAfaCfaggaaugiaa | 683 | AGGCAAUGAACAGGAAUGIAA | 881 |
| AM12242-SS-NL | asggcaaUfgAfaCfagiaauggaa | 684 | AGGCAAUGAACAGIAAUGGAA | 882 |
| AM12243-SS-NL | asggcaaUfgAfaCfaigaauggaa | 685 | AGGCAAUGAACAIGAAUGGAA | 883 |
| AM12244-SS-NL | gsggcaaUfgAfaCfaggaauigaa | 686 | GGGCAAUGAACAGGAAUIGAA | 884 |
| AM12592-SS-NL | csaguagGfuGfcUfcaaaacauca | 687 | GAGUAGGUGCUCAAAACAUCA | 885 |
| AM12595-SS-NL | usa_2NguagGfuGfcUfcaaaacauca | 688 | U(A^{2N})GUAGGUGCUCAAAACAUCA | 886 |
| AM12597-SS-NL | gsaguagguGfcUfCfaaaacauca | 689 | GAGUAGGUGCUCAAAACAUCA | 20 |
| AM12754-SS-NL | asggcaaugAfAfCfaggaauggaa | 690 | AGGCAAUGAACAGGAAUGGAA | 880 |
| AM12910-SS-NL | gsaguagGfuGfcUfcaaaacauca | 14 | GAGUAGGUGCUCAAAACAUCA | 20 |
| AM12911-SS-NL | asggcaaugAfAfCfaggaauigaa | 15 | AGGCAAUGAACAGGAAUIGAA | 21 |
| AM13987-SS-NL | csggaauggAfAfAfcugaacacaa | 13 | CGGAAUGGAAACUGAACACAA | 19 |
| AM14092-SS-NL | csggaauggAfaAfcUfgaacacaa | 694 | CGGAAUGGAAACUGAACACAA | 19 |
| AM15766-SS-NL | cscugggaaGfCfCfagaaauugua | 695 | CCUGGGAAGCCAGAAAUUGUA | 887 |
| AM16133-SS-NL | csggaauggAfAfAfcugaacacaa | 13 | CGGAAUGGAAACUGAACACAA | 19 |

(A^{2N}) = 2-aminoadenine-containing nucleotide; 1 = hypoxanthine (inosine) nucleotide}

TABLE 5
RAGE RNAi Agent Sense Strand Sequences (Shown With TriAlk14 Linker (see Table 11 for
structure information)).

| | | | Underlying Base Sequence TriAlkl4 | |
|---|---|---|---|---|
| | | SEQ ID | (Shown as an Unmodified Nucleotide | SEQ ID |
| Strand ID | Modified Sense Strand (5′→3′) | NO. | Sequence) | NO. |
| AM10307-SS | (TriAlk14)csggaauggAfAfAfcugaacacaas(invAb) | 16 | CGGAAUGGAAACUGAACACAA | 19 |
| AM10310-SS | (TriAlk14)gsgaauggaAfAfCfugaacacaias(invAb) | 698 | GGAAUGGAAACUGAACACAIA | 839 |
| AM10313-SS | (TriAlk14)asccagauuCfCfUfgggaaiccaas(invAb) | 699 | ACCAGAUUCCUGGGAAICCAA | 840 |
| AM10316-SS | (TriAlk14)usccugggaAfGfCfcagaaauugus(invAb) | 700 | UCCUGGGAAGCCAGAAAUUGU | 841 |
| AM10466-SS | (TriAlk14)gsccacuggUfGfCfugaaguguaas(invAb) | 701 | GCCACUGGUGCUGAAGUGUAA | 842 |
| AM10468-SS | (TriAlk14)csggacagaAfGfCfuuggaagiuas(invAb) | 702 | CGGACAGAAGCUUGGAAGIUA | 843 |
| AM10470-SS | (TriAlk14)csaggaugaGfGfGfgauuuuccias(invAb) | 703 | CAGGAUGAGGGGAUUUUCCIA | 844 |
| AM10472-SS | (TriAlk14)asgauuccuGfGfGfaagcuagaaas(invAb) | 704 | AGAUUCCUGGGAAGCUAGAAA | 845 |
| AM10474-SS | (TriAlk14)a_2NsgauucugCfCfUfcugaacucaas(invAb) | 705 | (A^{2N})GAUUCUGCCUCUGAACUCAA | 846 |
| AM10476-SS | (TriAlk14)usacccugcAfGfGfgacucuuagas(invAb) | 706 | UACCCUGCAGGGACUCUUAGA | 847 |
| AM10478-SS | (TriAlk14)ascccugcaGfGfGfacucuuaicus(invAb) | 707 | ACCCUGCAGGGACUCUUAICU | 848 |
| AM10480-SS | (TriAlk14)uscccaccuUfCfUfccuguaicuus(invAb) | 708 | UCCCACCUUCUCCUGUAICUU | 849 |
| AM10482-SS | (TriAlk14)asccuucucCfUfGfuagcuucaias(invAb) | 709 | ACCUUCUCCUGUAGCUUCAIA | 850 |
| AM10570-SS | (TriAlk14)gsgugcuggUfCfCfucagucuiuas(invAb) | 710 | GGUGCUGGUCCUCAGUCUIUA | 851 |
| AM10572-SS | (TriAlk14)gsgugcuggUfCfCfucagucuguas(invAb) | 711 | GGUGCUGGUCCUCAGUCUGUA | 852 |
| AM10574-SS | (TriAlk14)gsugcugguCfCfUfcagucuguias(invAb) | 712 | GUGCUGGUCCUCAGUCUGUIA | 853 |
| AM10576-SS | (TriAlk14)gsugcugguCfCfUfcagucuiugas(invAb) | 713 | GUGCUGGUCCUCAGUCUIUGA | 854 |
| AM10644-SS | (TriAlk14)csggaauggAfAfAfcugaacacaas(invAb) | 16 | CGGAAUGGAAACUGAACACAA | 19 |
| AM10716-SS | (TriAlk14)gsggaauggAfAfAfcugaacacaas(invAb) | 715 | GGGAAUGGAAACUGAACACAA | 855 |
| AM10718-SS | (TriAlk14)csggaauggAfAfAfcuiaacacaas(invAb) | 716 | CGGAAUGGAAACUIAACACAA | 856 |
| AM10719-SS | (TriAlk14)csggaauggAfa_2NAfcuiaacacaas(invAb) | 717 | CGGAAUGGA(A^{2N})ACUIAACACAA | 857 |
| AM10721-SS | (TriAlk14)csggaauggAfAfAfcugaauacaas(invAb) | 718 | CGGAAUGGAAACUGAAUACAA | 858 |
| AM10725-SS | (TriAlk14)csggaauGfgAfaAfcugaacacaas(invAb) | 719 | CGGAAUGGAAACUGAACACAA | 19 |
| AM10737-SS | (TriAlk14)usccugggaAfGfCfcagaaauugus(invAb) | 720 | UCCUGGGAAGCCAGAAAUUGU | 841 |
| AM10751-SS | (TriAlk14)gsaguagguGfCfUfcaaaacaucas(invAb) | 721 | GAGUAGGUGCUCAAAACAUCA | 20 |
| AM10753-SS | (TriAlk14)asggcaaugAfAfCfaggaauigaas(invAb) | 18 | AGGCAAUGAACAGGAAUIGAA | 21 |
| AM10755-SS | (TriAlk14)asguccgugUfCfUfaccaiauucas(invAb) | 723 | AGUCCGUGUCUACCAIAUUCA | 861 |
| AM10757-SS | (TriAlk14)usccgugucUfAfCfcagauuccuas(invAb) | 724 | UCCGUGUCUACCAGAUUCCUA | 862 |
| AM10759-SS | (TriAlk14)csccaccuuCfUfCfcuguaicuuas(invAb) | 725 | CCCACCUUCUCCUGUAICUUA | 863 |
| AM10761-SS | (TriAlk14)csuccucaaAfUfCfcacuigaugas(invAb) | 726 | CUCCUCAAAUCCACUIGAUGA | 864 |
| AM10773-SS | (TriAlk14)gsguagauuCfUfGfccucuiaacus(invAb) | 727 | GGUAGAUUCUGCCUCUIAACU | 865 |
| AM10775-SS | (TriAlk14)usagauucuGfCfCfucugaacucas(invAb) | 728 | UAGAUUCUGCCUCUGAACUCA | 866 |
| AM10777-SS | (TriAlk14)gsgcuggugUfUfCfccaauaaggus(invAb) | 729 | GGCUGGUGUUCCCAAUAAGGU | 867 |
| AM10779-SS | (TriAlk14)csugguguuCfCfCfaauaagiugas(invAb) | 730 | CUGGUGUUCCCAAUAAGIUGA | 868 |
| AM10781-SS | (TriAlk14)gscuuagcuGfGfCfacuuigaugas(invAb) | 731 | GCUUAGCUGGCACUUIGAUGA | 869 |
| AM10783-SS | (TriAlk14)cscuaaugaGfAfAfgggaiuaucus(invAb) | 732 | CCUAAUGAGAAGGGAIUAUCU | 870 |
| AM10785-SS | (TriAlk14)gsugagaagGfGfAfguaucuiugas(invAb) | 733 | GUGAGAAGGGAGUAUCUIUGA | 871 |
| AM10787-SS | (TriAlk14)csagcaucaGfCfAfucauciaacas(invAb) | 734 | CAGCAUCAGCAUCAUCIAACA | 872 |
| AM11105-SS | (TriAlk14)cggaauggAfAfAfcugaacacaas(invAb) | 735 | CGGAAUGGAAACUGAACACAA | 19 |
| AM11106-SS | (TriAlk14)csggaauggAfAfAfcugaacacaa(invAb) | 736 | CGGAAUGGAAACUGAACACAA | 19 |
| AM11107-SS | (TriAlk14)cggaauggAfAfAfcugaacacaa(invAb) | 737 | CGGAAUGGAAACUGAACACAA | 19 |
| AM11189-SS | (TriAlk14)csggaauGfgAfaAfcugaauacaas(invAb) | 738 | CGGAAUGGAAACUGAAUACAA | 858 |
| AM11193-SS | (TriAlk14)gsggaauGfgAfaAfcugaacacaas(invAb) | 739 | CGGAAUGGAAACUGAACACAA | 855 |
| AM11195-SS | (TriAlk14)usggaauGfgAfaAfcugaacacaas(invAb) | 740 | CGGAAUGGAAACUGAACACAA | 873 |
| AM11197-SS | (TriAlk14)csggaauGfgAfa_2NAfcugaacacaas(invAb) | 741 | CGGAAUGGA(A^{2N})ACUGAACACAA | 874 |
| AM11512-SS | (TriAlk14)cggaauggAfAfAfcugaacacaas(invAb) | 742 | CGGAAUGGAAACUGAACACAA | 19 |
| AM11513-SS | (TriAlk14)csggaauggAfAfAfcugaacacaas(invAb) | 16 | CGGAAUGGAAACUGAACACAA | 19 |
| AM11514-SS | (TriAlk14)csggaauggAfAfAfcugaacacaas(invAb) | 16 | CGGAAUGGAAACUGAACACAA | 19 |
| AM11515-SS | (TriAlk14)cggaauggAfAfAfcugaacacaas(invAb) | 745 | CGGAAUGGAAACUGAACACAA | 19 |
| AM11516-SS | (TriAlk14)csggaauggAfAfAfcugaacacaas(invAb) | 16 | CGGAAUGGAAACUGAACACAA | 19 |
| AM11517-SS | (TriAlk14)cggaauggAfAfAfcugaacacaas(invAb) | 747 | CGGAAUGGAAACUGAACACAA | 19 |
| AM11888-SS | (TriAlk14)gsaugaacaGfGfAfauggaaaggas(invAb) | 748 | GAUGAACAGGAAUGGAAAGGA | 875 |
| AM1189O-SS | (TriAlk14)gsaugaacaGfGfAfauggaaagias(invAb) | 749 | GAUGAACAGGAAUGGAAAGIA | 876 |
| AM11891-SS | (TriAlk14)gsacuaccgAfGfUfccgugucuaas(invAb) | 750 | GACUACCGAGUCCGUGUCUAA | 877 |
| AM11893-SS | (TriAlk14)usgccuaauGfAfGfaagggaguaus(invAb) | 751 | UGCCUAAUGAGAAGGGAGUAU | 878 |
| AM11896-SS | (TriAlk14)gsaguagguGfcUfcAfaaacaucas(invAb) | 752 | GAGUAGGUGCUCAAAACAUCA | 20 |
| AM11899-SS | (TriAlk14)gsaguagiuGfcUfcAfaaacaucas(invAb) | 753 | GAGUAGIUGCUCAAAACAUCA | 879 |
| AM11900-SS | (TriAlk14)gsaguagGfuGfcUfcaaaacaucas(invAb) | 17 | GAGUAGGUGCUCAAAACAUCA | 20 |
| AM11901-SS | (TriAlk14)gsaguagguGfcUfcaaaacaucas(invAb) | 755 | GAGUAGGUGCUCAAAACAUCA | 20 |
| AM12235-SS | (TriAlk14)asggcaaUfgAfaCfaggaauigaas(invAb) | 756 | AGGCAAUGAACAGGAAUIGAA | 21 |
| AM12238-SS | (TriAlk14)asggcaaUfgAfaCfaggaauggaas(invAb) | 757 | AGGCAAUGAACAGGAAUGGAA | 880 |
| AM12239-SS | (TriAlk14)asggcaaUfgAfaCfaggaaugiaas(invAb) | 758 | AGGCAAUGAACAGGAAUGIAA | 881 |
| AM12242-SS | (TriAlk14)asggcaaUfgAfaCfagiaauggaas(invAb) | 759 | AGGCAAUGAACAGIAAUGGAA | 882 |
| AM12243-SS | (TriAlk14)asggcaaUfgAfaCfaigaauggaas(invAb) | 760 | AGGCAAUGAACAIGAAUGGAA | 883 |
| AM12244-SS | (TriAlk14)gsggcaaUfgAfaCfaggaauigaas(invAb) | 761 | GGGCAAUGAACAGGAAUIGAA | 884 |
| AM12592-SS | (TriAlk14)csaguagGfuGfcUfcaaaacaucas(invAb) | 762 | GAGUAGGUGCUCAAAACAUCA | 885 |
| AM12595-SS | (TriAlk14)usa_2NguagGfuGfcUfcaaaacaucas(invAb) | 763 | U(A^{2N})GUAGGUGCUCAAAACAUCA | 886 |
| AM12597-SS | (TriAlk14)gsaguagguGfcUfCfaaaacaucas(invAb) | 764 | GAGUAGGUGCUCAAAACAUCA | 20 |
| AM12754-SS | (TriAlk14)asggcaaugAfAfCfaggaauggaas(invAb) | 765 | AGGCAAUGAACAGGAAUGGAA | 880 |
| AM12910-SS | (TriAlk14)gsaguagGfuGfcUfcaaaacaucas(invAb) | 17 | GAGUAGGUGCUCAAAACAUCA | 20 |
| AM12911-SS | (TriAlk14)asggcaaugAfAfCfaggaauigaas(invAb) | 18 | AGGCAAUGAACAGGAAUIGAA | 21 |
| AM13987-SS | (TriAlk14)csggaauggAfAfAfcugaacacaas(invAb) | 16 | CGGAAUGGAAACUGAACACAA | 19 |
| AM14092-SS | (TriAlk14)csggaauggAfaAfcUfgaacacaas(invAb) | 769 | CGGAAUGGAAACUGAACACAA | 19 |
| AM15766-SS | (TriAlk14)cscugggaaGfCfCfagaaauuguas(invAb) | 770 | CCUGGGAAGCCAGAAAUUGUA | 887 |
| AM16133-SS | (TriAlk14)scsggaauggAfAfAfcugaacacaas(invAb) | 771 | CGGAAUGGAAACUGAACACAA | 19 |

(A^{2N}) = 2-aminoadenine-containing nucleotide; 1 = hypoxanthine (inosine) nucleotide}

TABLE 6
RAGE RNAi Agent Sense Strand Sequences (Shown with Targeting Ligand Conjugate. The structure of
avβ6-SM6.1 is shown in Table 11, and the structure of Tri-SM6.1-avβ6-(TA14) is shown in FIG. 1.)

| | | | Corresponding |
|---|---|---|---|
| | | | Sense Strand |
| | | | AM Number |
| | | SEQ | Without Linker |
| Strand | | ID | or Conjugate |
| ID | Modified Sense Strand (5′→3′) | NO. | (See Table 4) |
| CS000363 | Tri-SM6.1-avβ6-(TA14)csggaauggAfAfAfcugaacacaas(invAb) | 10 | AM10307-SS-NL |
| CS000368 | Tri-SM6.1-avβ6-(TA14)cggaauggAfAfAfcugaacacaas(invAb) | 773 | AM11105-SS-NL |
| CS000369 | Tri-SM6.1-avβ6-(TA14)csggaauggAfAfAfcugaacacaa(invAb) | 774 | AM11106-SS-NL |
| CS000386 | Tri-SM6.1-avβ6-(TA14)cggaauggAfAfAfcugaacacaa(invAb) | 775 | AM11107-SS-NL |
| CS000497 | Tri-SM6.1-avβ6-(TA14)csggaauGfgAfaAfcugaauacaas(invAb) | 776 | AM11189-SS-NL |
| CS000499 | Tri-SM6.1-avβ6-(TA14)csggaauGfgAfaAfcugaacacaas(invAb) | 777 | AM10725-SS-NL |
| CS000503 | Tri-SM6.1-avβ6-(TA14)gsggaauGfgAfaAfcugaacacaas(invAb) | 778 | AM11193-SS-NL |
| CS000505 | Tri-SM6.1-avβ6-(TA14)usggaauGfgAfaAfcugaacacaas(invAb) | 779 | AM11195-SS-NL |
| CS000507 | Tri-SM6.1-avβ6-(TA14)csggaauGfgAfa_2NAfcugaacacaas(invAb) | 780 | AM11197-SS-NL |
| CS000531 | Tri-SM6.1-avβ6-(TA14)csggaauggAfAfAfcugaauacaas(invAb) | 781 | AM10721-SS-NL |
| CS000672 | avβ6-SM6.1-L6-C6-csggaauggAfAfAfcugaacacaas(invAb) | 782 | AM11514-SS-NL |
| CS000673 | avβ6-SM6.1-L6-C6s-(invAb)scggaauggAfAfAfcugaacacaas(invAb) | 783 | AM11515-SS-NL |
| CS000674 | avβ6-SM6.1-Alk-cyHex-csggaauggAfAfAfcugaacacaas(invAb) | 784 | AM11516-SS-NL |
| CS000675 | avβ6-SM6.1-Alk-cyHexs-(invAb)scggaauggAfAfAfcugaacacaas | 785 | AM11517-SS-NL |
| | (invAb) | | |
| CS000690 | avβ6-pep1-C6-csggaauggAfAfAfcugaacacaas(invAb) | 786 | AM11514-SS-NL |
| CS000691 | avβ6-pep1-C6s-(invAb)scggaauggAfAfAfcugaacacaas(invAb) | 787 | AM11515-SS-NL |
| CS000986 | Tri-SM6.1-avβ6-(TA14)gsggaauggAfAfAfcugaacacaas(invAb) | 788 | AM10716-SS-NL |
| CS000988 | Tri-SM6.1-avβ6-(TA14)csggaauggAfAfAfcuiaacacaas(invAb) | 789 | AM10718-SS-NL |
| CS000989 | Tri-SM6.l-avβ6-(TA14)csggaauggAfa_2NAfcuiaacacaas(invAb) | 790 | AM10719-SS-NL |
| CS001021 | Tri-SM6.1-avβ6-(TA14)gsgaauggaAfAfCfugaacacaias(invAb) | 791 | AM10310-SS-NL |
| CS001024 | Tri-SM6.1-avβ6-(TA14)asccagauuCfCfUfgggaaiccaas(invAb) | 792 | AM10313-SS-NL |
| CS001027 | Tri-SM6.1-avβ6-(TA14)usccugggaAfGfCfcagaaauugus(invAb) | 793 | AM10316-SS-NL |
| CS001579 | Tri-SM6.1-avβ6-(TA14)gsaguagGfuGfcUfcaaaacaucas(invAb) | 11 | AM12910-SS-NL |
| CS001582 | Tri-SM6.1-avβ6-(TA14)asggcaaugAfAfCfaggaauigaas(invAb) | 12 | AM12911-SS-NL |
| CS002138 | Tri-SM6.1-avβ6-(TA14)csggaauggAfaAfcUfgaacacaas(invAb) | 796 | AM14092-SS-NL |
| CS002399 | Tri-SM6.1-avβ6-(TA14)gsaguagGfuGfcUfcaaaacauca(invAb) | 797 | AM12910-SS-NL |
| CS002976 | Tri-SM6.1-avβ6-(TA14)cscugggaaGfCfCfagaaauuguas(invAb) | 798 | AM15766-SS-NL |
| CS003048 | Tri-SM6.1-avβ6-(TA14)scsggaauggAfAfAfcugaacacaas(invAb) | 799 | AM10307-SS-NL |

[0213] The RAGE RNAi agents disclosed herein are formed by annealing an antisense strand with a sense strand. A sense strand containing a sequence listed in Table 2, Table 4, Table 5, or Table 6 can be hybridized to any antisense strand containing a sequence listed in Table 2 or Table 3, provided the two sequences have a region of at least 85% complementarity over a contiguous 15, 16, 17, 18, 19, 20, or 21 nucleotide sequence.

[0214] As shown in Table 5 above, certain of the example RAGE RNAi agent nucleotide sequences are shown to further include reactive linking groups at one or both of the 5′ terminal end and the 3′ terminal end of the sense strand. For example, many of the RAGE RNAi agent sense strand sequences shown in Table 5 above have a (TriAlk14) linking group at the 5′ end of the nucleotide sequence. Other linking groups, such as an (NH2-C6) linking group or a (6-SS-6) or (C6-SS-C6) linking group, may be present as well or alternatively in certain embodiments. Such reactive linking groups are positioned to facilitate the linking of targeting ligands, targeting groups, and/or PK/PD modulators to the RAGE RNAi agents disclosed herein. Linking or conjugation reactions are well known in the art and provide for formation of covalent linkages between two molecules or reactants. Suitable conjugation reactions for use in the scope of the inventions herein include, but are not limited to, amide coupling reaction, Michael addition reaction, hydrazone formation reaction, inverse-demand Diels-Alder cycloaddition reaction, oxime ligation, and Copper (I)-catalyzed or strain-promoted azide-alkyne cycloaddition reaction cycloaddition reaction.

[0215] In some embodiments, targeting ligands, such as the integrin targeting ligands shown in the examples and figures disclosed herein, can be synthesized as activated esters, such as tetrafluorophenyl (TFP) esters, which can be displaced by a reactive amino group (e.g., NH₂-C₆) to attach the targeting ligand to the RAGE RNAi agents disclosed herein. In some embodiments, targeting ligands are synthesized as azides, which can be conjugated to a propargyl (e.g., TriAlk14) or DBCO group, for example, via Copper (I)-catalyzed or strain-promoted azide-alkyne cycloaddition reaction.

[0216] Additionally, certain of the nucleotide sequences can be synthesized with a dT nucleotide at the 3′ terminal end of the sense strand, followed by (3′→5′) a linker (e.g., C6-SS-C6). The linker can, in some embodiments, facilitate the linkage to additional components, such as, for example, a PK/PD modulator or one or more targeting ligands. As described herein, the disulfide bond of C6-SS-C6 is first reduced, removing the dT from the molecule, which can then facilitate the conjugation of the desired PK/PD modulator. The terminal dT nucleotide therefore is not a part of the fully conjugated construct.

[0217] In some embodiments, the antisense strand of a RAGE RNAi agent disclosed herein differs by 0, 1, 2, or 3 nucleotides from any of the antisense strand sequences in Table 3 or Table 10. In some embodiments, the sense strand of a RAGE RNAi agent disclosed herein differs by 0, 1, 2, or 3 nucleotides from any of the sense strand sequences in Table 4, Table 5, Table 6, or Table 10.

[0218] In some embodiments, a RAGE RNAi agent antisense strand comprises a nucleotide sequence of any of the sequences in Table 2 or Table 3. In some embodiments, a RAGE RNAi agent antisense strand comprises the sequence of nucleotides (from 5′ end→3′ end) 1-17, 2-17, 1-18, 2-18, 1-19, 2-19, 1-20, 2-20, 1-21, 2-21, 1-22, 2-22, 1-23, 2-23, 1-24, or 2-24 of any of the sequences in Table 2, Table 3, or Table 10. In certain embodiments, a RAGE RNAi agent antisense strand comprises or consists of a modified sequence of any one of the modified sequences in Table 3 or Table 10.

[0219] In some embodiments, a RAGE RNAi agent sense strand comprises the nucleotide sequence of any of the sequences in Table 2 or Table 4. In some embodiments, a RAGE RNAi agent sense strand comprises the sequence of nucleotides (from 5′ end→3′ end) 1-17, 2-17, 3-17, 4-17, 1-18, 2-18, 3-18, 4-18, 1-19, 2-19, 3-19, 4-19, 1-20, 2-20, 3-20, 4-20, 1-21, 2-21, 3-21, 4-21, 1-22, 2-22, 3-22, 4-22, 1-23, 2-23, 3-23, 4-23, 1-24, 2-24, 3-24, or 4-24, of any of the sequences in Table 2, Table 4, Table 5, Table 6, or Table 10. In certain embodiments, a RAGE RNAi agent sense strand comprises or consists of a modified sequence of any one of the modified sequences in Table 3 or Table 10.

[0220] For the RNAi agents disclosed herein, the nucleotide at position 1 of the antisense strand (from 5′ end→3′ end) can be perfectly complementary to an AGER gene, or can be non-complementary to an AGER gene. In some embodiments, the nucleotide at position 1 of the antisense strand (from 5′ end→3′ end) is a U, A, or dT (or a modified version of U, A or dT). In some embodiments, the nucleotide at position 1 of the antisense strand (from 5′ end→3′ end) forms an A:U or U:A base pair with the sense strand.

[0221] In some embodiments, a RAGE RNAi agent antisense strand comprises the sequence of nucleotides (from 5′ end→3′ end) 2-18 or 2-19 of any of the antisense strand sequences in Table 2, Table 3, or Table 10. In some embodiments, a RAGE RNAi sense strand comprises the sequence of nucleotides (from 5′ end→3′ end) 1-17 or 1-18 of any of the sense strand sequences in Table 2, Table 4, Table 5, Table 6, or Table 10.

[0222] In some embodiments, a RAGE RNAi agent includes (i) an antisense strand comprising the sequence of nucleotides (from 5′ end→3′ end) 2-18 or 2-19 of any of the antisense strand sequences in Table 2, Table 3, or Table 10, and (ii) a sense strand comprising the sequence of nucleotides (from 5′ end→3′ end) 1-17 or 1-18 of any of the sense strand sequences in Table 2, Table 4, Table 5, Table 6, or Table 10.

[0223] A sense strand containing a sequence listed in Table 2 or Table 4 can be hybridized to any antisense strand containing a sequence listed in Table 2 or Table 3 provided the two sequences have a region of at least 85% complementarity over a contiguous 16, 17, 18, 19, 20, or 21 nucleotide sequence. In some embodiments, the RAGE RNAi agent has a sense strand consisting of the modified sequence of any of the modified sequences in Table 4, Table 5, Table 6, or Table 10, and an antisense strand consisting of the modified sequence of any of the modified sequences in Table 3 or Table 10. Certain representative sequence pairings are exemplified by the Duplex ID Nos. shown in Tables 7A, 7B, 8, 9A and 9B.

[0224] In some embodiments, a RAGE RNAi agent comprises, consists of, or consists essentially of a duplex represented by any one of the Duplex ID Nos. presented herein. In some embodiments, a RAGE RNAi agent consists of any of the Duplex ID Nos. presented herein. In some embodiments, a RAGE RNAi agent comprises the sense strand and antisense strand nucleotide sequences of any of the Duplex ID Nos. presented herein. In some embodiments, a RAGE RNAi agent comprises the sense strand and antisense strand nucleotide sequences of any of the Duplex ID Nos. presented herein and a targeting group, linking group, and/or other non-nucleotide group wherein the targeting group, linking group, and/or other non-nucleotide group is covalently linked (i.e., conjugated) to the sense strand or the antisense strand. In some embodiments, a RAGE RNAi agent includes the sense strand and antisense strand modified nucleotide sequences of any of the Duplex ID Nos. presented herein. In some embodiments, a RAGE RNAi agent comprises the sense strand and antisense strand modified nucleotide sequences of any of the Duplex ID Nos. presented herein and a targeting group, linking group, and/or other non-nucleotide group, wherein the targeting group, linking group, and/or other non-nucleotide group is covalently linked to the sense strand or the antisense strand.

[0225] In some embodiments, a RAGE RNAi agent comprises an antisense strand and a sense strand having the nucleotide sequences of any of the antisense strand/sense strand duplexes of Tables 2, 7A, 7B, 8, 9A, 9B, or 10, and comprises a targeting group. In some embodiments, a RAGE RNAi agent comprises an antisense strand and a sense strand having the nucleotide sequences of any of the antisense strand/sense strand duplexes of Tables 2, 7A, 7B, 8, 9A, 9B, or 10, and comprises one or more αvβ6 integrin targeting ligands.

[0226] In some embodiments, a RAGE RNAi agent comprises an antisense strand and a sense strand having the nucleotide sequences of any of the antisense strand/sense strand duplexes of Tables 2, 7A, 7B, 8, 9A, 9B, or 10, and comprises a targeting group that is an integrin targeting ligand. In some embodiments, a RAGE RNAi agent comprises an antisense strand and a sense strand having the nucleotide sequences of any of the antisense strand/sense strand duplexes of Tables 2, 7A, 7B, 8, 9A, 9B, or 10, and comprises one or more αvβ6 integrin targeting ligands or clusters of αvβ6 integrin targeting ligands (e.g., a tridentate αvβ6 integrin targeting ligand).

[0227] In some embodiments, a RAGE RNAi agent comprises an antisense strand and a sense strand having the modified nucleotide sequences of any of the antisense strand/sense strand duplexes of Tables 7A, 7B, 8, 9A, 9B, and 10.

[0228] In some embodiments, a RAGE RNAi agent comprises an antisense strand and a sense strand having the modified nucleotide sequences of any of the antisense strand/sense strand duplexes of Tables 7A, 7B, 8, 9A, 9B, and 10, and comprises an integrin targeting ligand.

[0229] In some embodiments, a RAGE RNAi agent comprises, consists of, or consists essentially of any of the duplexes of Tables 7A, 7B, 8, 9A, 9B, and 10.

TABLE 7A
AGE RNAi Agent Duplexes with Corresponding Sense and Antisense
Strand ID Numbers and Sequence ID numbers for the modified and unmodified
nucleotide sequences. (Shown without Linking Agents or Conjugates)

| | | AS | AS | | SS | SS |
|---|---|---|---|---|---|---|
| | | modified | unmodified | | modified | unmodified |
| | | SEQID | SEQ ID | | SEQ ID | SEQ ID |
| Duplex | AS ID | NO: | NO: | SS ID | NO: | NO: |
| AD07474 | AM10308-AS | 2 | 7 | AM10307-SS-NL | 13 | 19 |
| AD07475 | AM10309-AS | 3 | 7 | AM10307-SS-NL | 13 | 19 |
| AD07476 | AM10311-AS | 543 | 801 | AM10310-SS-NL | 623 | 839 |
| AD07477 | AM10312-AS | 544 | 801 | AM10310-SS-NL | 623 | 839 |
| AD07478 | AM10314-AS | 545 | 802 | AM10313-SS-NL | 624 | 840 |
| AD07479 | AM10315-AS | 546 | 802 | AM10313-SS-NL | 624 | 840 |
| AD07480 | AM10317-AS | 547 | 803 | AM10316-SS-NL | 625 | 841 |
| AD07481 | AM10318-AS | 548 | 803 | AM10316-SS-NL | 625 | 841 |
| AD07559 | AM10467-AS | 549 | 804 | AM10466-SS-NL | 626 | 842 |
| AD07560 | AM10469-AS | 550 | 805 | AM10468-SS-NL | 627 | 843 |
| AD07561 | AM10471-AS | 551 | 806 | AM10470-SS-NL | 628 | 844 |
| AD07562 | AM10473-AS | 552 | 807 | AM10472-SS-NL | 629 | 845 |
| AD07563 | AM10475-AS | 553 | 808 | AM10474-SS-NL | 630 | 846 |
| AD07564 | AM10477-AS | 554 | 809 | AM10476-SS-NL | 631 | 847 |
| AD07565 | AM10479-AS | 555 | 810 | AM10478-SS-NL | 632 | 848 |
| AD07566 | AM10481-AS | 556 | 811 | AM10480-SS-NL | 633 | 849 |
| AD07567 | AM10483-AS | 557 | 812 | AM10482-SS-NL | 634 | 850 |
| AD07621 | AM10571-AS | 558 | 813 | AM10570-SS-NL | 635 | 851 |
| AD07622 | AM10573-AS | 559 | 813 | AM10572-SS-NL | 636 | 852 |
| AD07623 | AM10575-AS | 560 | 814 | AM10574-SS-NL | 637 | 853 |
| AD07624 | AM10575-AS | 560 | 814 | AM10576-SS-NL | 638 | 854 |
| AD07661 | AM10308-AS | 2 | 7 | AM10644-SS-NL | 13 | 19 |
| AD07700 | AM10717-AS | 561 | 815 | AM10716-SS-NL | 640 | 855 |
| AD07701 | AM10308-AS | 2 | 7 | AM10718-SS-NL | 641 | 856 |
| AD07702 | AM10308-AS | 2 | 7 | AM10719-SS-NL | 642 | 857 |
| AD07703 | AM10720-AS | 562 | 7 | AM10307-SS-NL | 13 | 19 |
| AD07704 | AM10308-AS | 2 | 7 | AM10721-SS-NL | 643 | 858 |
| AD07705 | AM10722-AS | 563 | 7 | AM10307-SS-NL | 13 | 19 |
| AD07706 | AM10723-AS | 564 | 7 | AM10307-SS-NL | 13 | 19 |
| AD07707 | AM10724-AS | 565 | 7 | AM10307-SS-NL | 13 | 19 |
| AD07708 | AM10723-AS | 564 | 7 | AM10725-SS-NL | 644 | 19 |
| AD07715 | AM10317-AS | 547 | 803 | AM10737-SS-NL | 645 | 841 |
| AD07725 | AM10752-AS | 566 | 9 | AM10751-SS-NL | 646 | 20 |
| AD07726 | AM10754-AS | 4 | 8 | AM10753-SS-NL | 15 | 21 |
| AD07727 | AM10756-AS | 568 | 818 | AM10755-SS-NL | 648 | 861 |
| AD07728 | AM10758-AS | 569 | 819 | AM10757-SS-NL | 649 | 862 |
| AD07729 | AM10760-AS | 570 | 820 | AM10759-SS-NL | 650 | 863 |
| AD07730 | AM10762-AS | 571 | 821 | AM10761-SS-NL | 651 | 864 |
| AD07736 | AM10774-AS | 572 | 822 | AM10773-SS-NL | 652 | 865 |
| AD07737 | AM10776-AS | 573 | 823 | AM10775-SS-NL | 653 | 866 |
| AD07738 | AM10778-AS | 574 | 824 | AM10777-SS-NL | 654 | 867 |
| AD07739 | AM10780-AS | 575 | 825 | AM10779-SS-NL | 655 | 868 |
| AD07740 | AM10782-AS | 576 | 826 | AM10781-SS-NL | 656 | 869 |
| AD07741 | AM10784-AS | 577 | 827 | AM10783-SS-NL | 657 | 870 |
| AD07742 | AM10786-AS | 578 | 828 | AM10785-SS-NL | 658 | 871 |
| AD07743 | AM10788-AS | 579 | 829 | AM10787-SS-NL | 659 | 872 |
| AD07972 | AM11103-AS | 580 | 7 | AM10307-SS-NL | 13 | 19 |
| AD07973 | AM11104-AS | 581 | 7 | AM10307-SS-NL | 13 | 19 |
| AD07974 | AM11104-AS | 581 | 7 | AM11105-SS-NL | 660 | 19 |
| AD07975 | AM11104-AS | 581 | 7 | AM11106-SS-NL | 13 | 19 |
| AD07976 | AM11104-AS | 581 | 7 | AM11107-SS-NL | 662 | 19 |
| AD08030 | AM10309-AS | 3 | 7 | AM10721-SS-NL | 643 | 858 |
| AD08031 | AM11188-AS | 582 | 7 | AM10725-SS-NL | 644 | 19 |
| AD08032 | AM10723-AS | 564 | 7 | AM11189-SS-NL | 663 | 858 |
| AD08033 | AM11188-AS | 582 | 7 | AM11189-SS-NL | 663 | 858 |
| AD08034 | AM11190-AS | 583 | 7 | AM10725-SS-NL | 644 | 19 |
| AD08035 | AM11191-AS | 584 | 7 | AM10725-SS-NL | 644 | 19 |
| AD08036 | AM11192-AS | 585 | 7 | AM10725-SS-NL | 644 | 19 |
| AD08037 | AM11194-AS | 586 | 815 | AM11193-SS-NL | 664 | 855 |
| AD08038 | AM11196-AS | 587 | 830 | AM11195-SS-NL | 665 | 873 |
| AD08039 | AM10723-AS | 564 | 7 | AM11197-SS-NL | 666 | 874 |
| AD08258 | AM10309-AS | 3 | 7 | AM11512-SS-NL | 667 | 19 |
| AD08259 | AM10309-AS | 3 | 7 | AM11513-SS-NL | 13 | 19 |
| AD08260 | AM10309-AS | 3 | 7 | AM11514-SS-NL | 13 | 19 |
| AD08261 | AM10309-AS | 3 | 7 | AM11515-SS-NL | 670 | 19 |
| AD08262 | AM10309-AS | 3 | 7 | AM11516-SS-NL | 13 | 19 |
| AD08263 | AM10309-AS | 3 | 7 | AM11517-SS-NL | 672 | 19 |
| AD08432 | AM11757-AS | 588 | 7 | AM10725-SS-NL | 644 | 19 |
| AD08433 | AM11758-AS | 589 | 7 | AM10725-SS-NL | 644 | 19 |
| AD08434 | AM11759-AS | 590 | 815 | AM11193-SS-NL | 664 | 855 |
| AD08435 | AM11760-AS | 591 | 815 | AM11193-SS-NL | 664 | 855 |
| AD08436 | AM11761-AS | 592 | 815 | AM11193-SS-NL | 664 | 855 |
| AD08437 | AM11762-AS | 593 | 7 | AM10725-SS-NL | 644 | 19 |
| AD08438 | AM11763-AS | 594 | 815 | AM11193-SS-NL | 664 | 855 |
| AD08439 | AM11764-AS | 595 | 815 | AM11193-SS-NL | 664 | 855 |
| AD08510 | AM11889-AS | 596 | 831 | AM11888-SS-NL | 673 | 875 |
| AD08511 | AM11889-AS | 596 | 831 | AM11890-SS-NL | 674 | 876 |
| AD08512 | AM11892-AS | 597 | 832 | AM11891-SS-NL | 675 | 877 |
| AD08513 | AM11894-AS | 598 | 833 | AM11893-SS-NL | 676 | 878 |
| AD08514 | AM11895-AS | 599 | 9 | AM10751-SS-NL | 646 | 20 |
| AD08515 | AM11897-AS | 5 | 9 | AM11896-SS-NL | 677 | 20 |
| AD08516 | AM11898-AS | 6 | 9 | AM11896-SS-NL | 677 | 20 |
| AD08517 | AM11898-AS | 6 | 9 | AM11899-SS-NL | 678 | 879 |
| AD08518 | AM11897-AS | 5 | 9 | AM11900-SS-NL | 14 | 20 |
| AD08519 | AM11898-AS | 6 | 9 | AM11900-SS-NL | 14 | 20 |
| AD08520 | AM11897-AS | 5 | 9 | AM11901-SS-NL | 680 | 20 |
| AD08521 | AM11898-AS | 6 | 9 | AM11901-SS-NL | 680 | 20 |
| AD08711 | AM12234-AS | 602 | 8 | AM10753-SS-NL | 15 | 21 |
| AD08712 | AM12236-AS | 603 | 8 | AM12235-SS-NL | 681 | 21 |
| AD08713 | AM12237-AS | 604 | 8 | AM12235-SS-NL | 681 | 21 |
| AD08714 | AM12236-AS | 603 | 8 | AM12238-SS-NL | 682 | 880 |
| AD08715 | AM12236-AS | 603 | 8 | AM12239-SS-NL | 683 | 881 |
| AD08716 | AM12240-AS | 605 | 8 | AM12238-SS-NL | 682 | 880 |
| AD08717 | AM12241-AS | 606 | 8 | AM12238-SS-NL | 682 | 880 |
| AD08718 | AM12236-AS | 603 | 8 | AM12242-SS-NL | 684 | 882 |
| AD08719 | AM12236-AS | 603 | 8 | AM12243-SS-NL | 685 | 883 |
| AD08720 | AM12245-AS | 607 | 834 | AM12244-SS-NL | 686 | 884 |
| AD08898 | AM10309-AS | 3 | 7 | AM10644-SS-NL | 13 | 19 |
| AD08944 | AM12593-AS | 608 | 835 | AM12592-SS-NL | 687 | 885 |
| AD08945 | AM12594-AS | 609 | 9 | AM11900-SS-NL | 14 | 20 |
| AD08946 | AM12596-AS | 610 | 836 | AM12595-SS-NL | 688 | 886 |
| AD08947 | AM11897-AS | 5 | 9 | AM12597-SS-NL | 689 | 20 |
| AD09051 | AM10754-AS | 4 | 8 | AM12754-SS-NL | 690 | 880 |
| AD09052 | AM12234-AS | 602 | 8 | AM12754-SS-NL | 690 | 880 |
| AD09053 | AM12236-AS | 603 | 8 | AM10753-SS-NL | 15 | 21 |
| AD09054 | AM10754-AS | 4 | 8 | AM12235-SS-NL | 681 | 21 |
| AD09055 | AM12755-AS | 611 | 8 | AM12235-SS-NL | 681 | 21 |
| AD09056 | AM12756-AS | 612 | 8 | AM12235-SS-NL | 681 | 21 |
| AD09057 | AM12757-AS | 613 | 8 | AM12235-SS-NL | 681 | 21 |
| AD09150 | AM11897-AS | 5 | 9 | AM12910-SS-NL | 14 | 20 |
| AD09151 | AM11898-AS | 6 | 9 | AM12910-SS-NL | 14 | 20 |
| AD09152 | AM10754-AS | 4 | 8 | AM12911-SS-NL | 15 | 21 |
| AD09797 | AM10309-AS | 3 | 7 | AM13987-SS-NL | 13 | 19 |
| AD09868 | AM10308-AS | 2 | 7 | AM13987-SS-NL | 13 | 19 |
| AD09870 | AM14090-AS | 614 | 7 | AM10725-SS-NL | 644 | 19 |
| AD09871 | AM14091-AS | 615 | 7 | AM10725-SS-NL | 644 | 19 |
| AD09872 | AM14091-AS | 615 | 7 | AM14092-SS-NL | 694 | 19 |
| AD09873 | AM14093-AS | 616 | 9 | AM11900-SS-NL | 14 | 20 |
| AD09874 | AM14094-AS | 617 | 9 | AM11900-SS-NL | 14 | 20 |
| AD09875 | AM14095-AS | 618 | 9 | AM11900-SS-NL | 14 | 20 |
| AD09876 | AM14095-AS | 618 | 9 | AM12597-SS-NL | 689 | 20 |
| AD09877 | AM14095-AS | 618 | 9 | AM11896-SS-NL | 677 | 20 |
| AD10543 | AM15021-AS | 619 | 830 | AM11195-SS-NL | 665 | 873 |
| AD11078 | AM15767-AS | 620 | 837 | AM15766-SS-NL | 695 | 887 |
| AD11080 | AM15770-AS | 621 | 801 | AM10310-SS-NL | 623 | 839 |
| AD11353 | AM10309-AS | 3 | 7 | AM16133-SS-NL | 13 | 19 |

TABLE 7B
RAGE RNAi Agent Duplexes with Corresponding Sense and Antisense
Strand ID Numbers and Sequence ID numbers for the modified and unmodified
nucleotide sequences.

| | | AS | AS | | SS | SS |
|---|---|---|---|---|---|---|
| | | modified | unmodified | | modified | unmodified |
| | | SEQ ID | SEQ ID | | SEQ ID | SEQ ID |
| Duplex | AS ID | NO: | NO: | SS ID | NO: | NO: |
| AD07474 | AM10308-AS | 2 | 7 | AM10307-SS | 16 | 19 |
| AD07475 | AM10309-AS | 3 | 7 | AM10307-SS | 16 | 19 |
| AD07476 | AM10311-AS | 543 | 801 | AM10310-SS | 698 | 839 |
| AD07477 | AM10312-AS | 544 | 801 | AM10310-SS | 698 | 839 |
| AD07478 | AM10314-AS | 545 | 802 | AM10313-SS | 699 | 840 |
| AD07479 | AM10315-AS | 546 | 802 | AM10313-SS | 699 | 840 |
| AD07480 | AM10317-AS | 547 | 803 | AM10316-SS | 700 | 841 |
| AD07481 | AM10318-AS | 548 | 803 | AM10316-SS | 700 | 841 |
| AD07559 | AM10467-AS | 549 | 804 | AM10466-SS | 701 | 842 |
| AD07560 | AM10469-AS | 550 | 805 | AM10468-SS | 702 | 843 |
| AD07561 | AM10471-AS | 551 | 806 | AM10470-SS | 703 | 844 |
| AD07562 | AM10473-AS | 552 | 807 | AM10472-SS | 704 | 845 |
| AD07563 | AM10475-AS | 553 | 808 | AM10474-SS | 705 | 846 |
| AD07564 | AM10477-AS | 554 | 809 | AM10476-SS | 706 | 847 |
| AD07565 | AM10479-AS | 555 | 810 | AM10478-SS | 707 | 848 |
| AD07566 | AM10481-AS | 556 | 811 | AM10480-SS | 708 | 849 |
| AD07567 | AM10483-AS | 557 | 812 | AM10482-SS | 709 | 850 |
| AD07621 | AM10571-AS | 558 | 813 | AM10570-SS | 710 | 851 |
| AD07622 | AM10573-AS | 559 | 813 | AM10572-SS | 711 | 852 |
| AD07623 | AM10575-AS | 560 | 814 | AM10574-SS | 712 | 853 |
| AD07624 | AM10575-AS | 560 | 814 | AM10576-SS | 713 | 854 |
| AD07661 | AM10308-AS | 2 | 7 | AM10644-SS | 16 | 19 |
| AD07700 | AM10717-AS | 561 | 815 | AM10716-SS | 715 | 855 |
| AD07701 | AM10308-AS | 2 | 7 | AM10718-SS | 716 | 856 |
| AD07702 | AM10308-AS | 2 | 7 | AM10719-SS | 717 | 857 |
| AD07703 | AM10720-AS | 562 | 7 | AM10307-SS | 16 | 19 |
| AD07704 | AM10308-AS | 2 | 7 | AM10721-SS | 718 | 858 |
| AD07705 | AM10722-AS | 563 | 7 | AM10307-SS | 16 | 19 |
| AD07706 | AM10723-AS | 564 | 7 | AM10307-SS | 16 | 19 |
| AD07707 | AM10724-AS | 565 | 7 | AM10307-SS | 16 | 19 |
| AD07708 | AM10723-AS | 564 | 7 | AM10725-SS | 719 | 19 |
| AD07715 | AM10317-AS | 547 | 803 | AM10737-SS | 720 | 841 |
| AD07725 | AM10752-AS | 566 | 9 | AM10751-SS | 721 | 20 |
| AD07726 | AM10754-AS | 4 | 8 | AM10753-SS | 18 | 21 |
| AD07727 | AM10756-AS | 568 | 818 | AM10755-SS | 723 | 861 |
| AD07728 | AM10758-AS | 569 | 819 | AM10757-SS | 724 | 862 |
| AD07729 | AM10760-AS | 570 | 820 | AM10759-SS | 725 | 863 |
| AD07730 | AM10762-AS | 571 | 821 | AM10761-SS | 726 | 864 |
| AD07736 | AM10774-AS | 572 | 822 | AM10773-SS | 727 | 865 |
| AD07737 | AM10776-AS | 573 | 823 | AM10775-SS | 728 | 866 |
| AD07738 | AM10778-AS | 574 | 824 | AM10777-SS | 729 | 867 |
| AD07739 | AM10780-AS | 575 | 825 | AM10779-SS | 730 | 868 |
| AD07740 | AM10782-AS | 576 | 826 | AM10781-SS | 731 | 869 |
| AD07741 | AM10784-AS | 577 | 827 | AM10783-SS | 732 | 870 |
| AD07742 | AM10786-AS | 578 | 828 | AM10785-SS | 733 | 871 |
| AD07743 | AM10788-AS | 579 | 829 | AM10787-SS | 734 | 872 |
| AD07972 | AM11103-AS | 580 | 7 | AM10307-SS | 16 | 19 |
| AD07973 | AM11104-AS | 581 | 7 | AM10307-SS | 16 | 19 |
| AD07974 | AM11104-AS | 581 | 7 | AM11105-SS | 735 | 19 |
| AD07975 | AM11104-AS | 581 | 7 | AM11106-SS | 736 | 19 |
| AD07976 | AM11104-AS | 581 | 7 | AM11107-SS | 737 | 19 |
| AD08030 | AM10309-AS | 3 | 7 | AM10721-SS | 718 | 858 |
| AD08031 | AM11188-AS | 582 | 7 | AM10725-SS | 719 | 19 |
| AD08032 | AM10723-AS | 564 | 7 | AM11189-SS | 738 | 858 |
| AD08033 | AM11188-AS | 582 | 7 | AM11189-SS | 738 | 858 |
| AD08034 | AM11190-AS | 583 | 7 | AM10725-SS | 719 | 19 |
| AD08035 | AM11191-AS | 584 | 7 | AM10725-SS | 719 | 19 |
| AD08036 | AM11192-AS | 585 | 7 | AM10725-SS | 719 | 19 |
| AD08037 | AM11194-AS | 586 | 815 | AM11193-SS | 739 | 855 |
| AD08038 | AM11196-AS | 587 | 830 | AM11195-SS | 740 | 873 |
| AD08039 | AM10723-AS | 564 | 7 | AM11197-SS | 741 | 874 |
| AD08258 | AM10309-AS | 3 | 7 | AM11512-SS | 742 | 19 |
| AD08259 | AM10309-AS | 3 | 7 | AM11513-SS | 16 | 19 |
| AD08260 | AM10309-AS | 3 | 7 | AM11514-SS | 16 | 19 |
| AD08261 | AM10309-AS | 3 | 7 | AM11515-SS | 745 | 19 |
| AD08262 | AM10309-AS | 3 | 7 | AM11516-SS | 16 | 19 |
| AD08263 | AM10309-AS | 3 | 7 | AM11517-SS | 747 | 19 |
| AD08432 | AM11757-AS | 588 | 7 | AM10725-SS | 719 | 19 |
| AD08433 | AM11758-AS | 589 | 7 | AM10725-SS | 719 | 19 |
| AD08434 | AM11759-AS | 590 | 815 | AM11193-SS | 739 | 855 |
| AD08435 | AM11760-AS | 591 | 815 | AM11193-SS | 739 | 855 |
| AD08436 | AM11761-AS | 592 | 815 | AM11193-SS | 739 | 855 |
| AD08437 | AM11762-AS | 593 | 7 | AM10725-SS | 719 | 19 |
| AD08438 | AM11763-AS | 594 | 815 | AM11193-SS | 739 | 855 |
| AD08439 | AM11764-AS | 595 | 815 | AM11193-SS | 739 | 855 |
| AD08510 | AM11889-AS | 596 | 831 | AM11888-SS | 748 | 875 |
| AD08511 | AM11889-AS | 596 | 831 | AM11890-SS | 749 | 876 |
| AD08512 | AM11892-AS | 597 | 832 | AM11891-SS | 750 | 877 |
| AD08513 | AM11894-AS | 598 | 833 | AM11893-SS | 751 | 878 |
| AD08514 | AM11895-AS | 599 | 9 | AM10751-SS | 721 | 20 |
| AD08515 | AM11897-AS | 5 | 9 | AM11896-SS | 752 | 20 |
| AD08516 | AM11898-AS | 6 | 9 | AM11896-SS | 752 | 20 |
| AD08517 | AM11898-AS | 6 | 9 | AM11899-SS | 753 | 879 |
| AD08518 | AM11897-AS | 5 | 9 | AM11900-SS | 17 | 20 |
| AD08519 | AM11898-AS | 6 | 9 | AM11900-SS | 17 | 20 |
| AD08520 | AM11897-AS | 5 | 9 | AM11901-SS | 755 | 20 |
| AD08521 | AM11898-AS | 6 | 9 | AM11901-SS | 755 | 20 |
| AD08711 | AM12234-AS | 602 | 8 | AM10753-SS | 18 | 21 |
| AD08712 | AM12236-AS | 603 | 8 | AM12235-SS | 756 | 21 |
| AD08713 | AM12237-AS | 604 | 8 | AM12235-SS | 756 | 21 |
| AD08714 | AM12236-AS | 603 | 8 | AM12238-SS | 757 | 880 |
| AD08715 | AM12236-AS | 603 | 8 | AM12239-SS | 758 | 881 |
| AD08716 | AM12240-AS | 605 | 8 | AM12238-SS | 757 | 880 |
| AD08717 | AM12241-AS | 606 | 8 | AM12238-SS | 757 | 880 |
| AD08718 | AM12236-AS | 603 | 8 | AM12242-SS | 759 | 882 |
| AD08719 | AM12236-AS | 603 | 8 | AM12243-SS | 760 | 883 |
| AD08720 | AM12245-AS | 607 | 834 | AM12244-SS | 761 | 884 |
| AD08898 | AM10309-AS | 3 | 7 | AM10644-SS | 16 | 19 |
| AD08944 | AM12593-AS | 608 | 835 | AM12592-SS | 762 | 885 |
| AD08945 | AM12594-AS | 609 | 9 | AM11900-SS | 17 | 20 |
| AD08946 | AM12596-AS | 610 | 836 | AM12595-SS | 763 | 886 |
| AD08947 | AM11897-AS | 5 | 9 | AM12597-SS | 764 | 20 |
| AD09051 | AM10754-AS | 4 | 8 | AM12754-SS | 765 | 880 |
| AD09052 | AM12234-AS | 602 | 8 | AM12754-SS | 765 | 880 |
| AD09053 | AM12236-AS | 603 | 8 | AM10753-SS | 18 | 21 |
| AD09054 | AM10754-AS | 4 | 8 | AM12235-SS | 756 | 21 |
| AD09055 | AM12755-AS | 611 | 8 | AM12235-SS | 756 | 21 |
| AD09056 | AM12756-AS | 612 | 8 | AM12235-SS | 756 | 21 |
| AD09057 | AM12757-AS | 613 | 8 | AM12235-SS | 756 | 21 |
| AD09150 | AM11897-AS | 5 | 9 | AM12910-SS | 17 | 20 |
| AD09151 | AM11898-AS | 6 | 9 | AM12910-SS | 17 | 20 |
| AD09152 | AM10754-AS | 4 | 8 | AM12911-SS | 18 | 21 |
| AD09797 | AM10309-AS | 3 | 7 | AM13987-SS | 16 | 19 |
| AD09868 | AM10308-AS | 2 | 7 | AM13987-SS | 16 | 19 |
| AD09870 | AM14090-AS | 614 | 7 | AM10725-SS | 719 | 19 |
| AD09871 | AM14091-AS | 615 | 7 | AM10725-SS | 719 | 19 |
| AD09872 | AM14091-AS | 615 | 7 | AM14092-SS | 769 | 19 |
| AD09873 | AM14093-AS | 616 | 9 | AM11900-SS | 17 | 20 |
| AD09874 | AM14094-AS | 617 | 9 | AM11900-SS | 17 | 20 |
| AD09875 | AM14095-AS | 618 | 9 | AM11900-SS | 17 | 20 |
| AD09876 | AM14095-AS | 618 | 9 | AM12597-SS | 764 | 20 |
| AD09877 | AM14095-AS | 618 | 9 | AM11896-SS | 752 | 20 |
| AD10543 | AM15021-AS | 619 | 830 | AM11195-SS | 740 | 873 |
| AD11078 | AM15767-AS | 620 | 837 | AM15766-SS | 770 | 887 |
| AD11080 | AM15770-AS | 621 | 801 | AM10310-SS | 698 | 839 |
| AD11353 | AM10309-AS | 3 | 7 | AM16133-SS | 771 | 19 |

TABLE 8
RAGE RNAi Agent Duplexes with Corresponding Sense and Antisense Strand
ID Numbers and Sequence ID numbers for the modified and unmodified nucleotide
sequences. (Shown with Targeting Ligand Conjugates)

| | | AS | AS | | SS | SS |
|---|---|---|---|---|---|---|
| | | modified | unmodified | | modified | unmodified |
| | | SEQ ID | SEQ ID | | SEQ ID | SEQ ID |
| Duplex | AS ID | NO: | NO: | SS ID | NO: | NO: |
| AC000286 | AM10308-AS | 2 | 7 | CS000363 | 10 | 19 |
| AC000287 | AM10309-AS | 3 | 7 | CS000363 | 10 | 19 |
| AC000288 | AM11103-AS | 580 | 7 | CS000363 | 10 | 19 |
| AC000289 | AM11104-AS | 581 | 7 | CS000363 | 10 | 19 |
| AC000290 | AM11104-AS | 581 | 7 | CS000368 | 773 | 19 |
| AC000291 | AM11104-AS | 581 | 7 | CS000369 | 774 | 19 |
| AC000292 | AM10309-AS | 3 | 7 | CS000363 | 10 | 19 |
| AC000293 | AM11103-AS | 580 | 7 | CS000363 | 10 | 19 |
| AC000294 | AM11104-AS | 581 | 7 | CS000363 | 10 | 19 |
| AC000312 | AM11104-AS | 581 | 7 | CS000386 | 775 | 19 |
| AC000414 | AM11188-AS | 582 | 7 | CS000497 | 776 | 858 |
| AC000415 | AM11190-AS | 583 | 7 | CS000499 | 777 | 19 |
| AC000416 | AM11191-AS | 584 | 7 | CS000499 | 777 | 19 |
| AC000417 | AM11192-AS | 585 | 7 | CS000499 | 777 | 19 |
| AC000418 | AM11194-AS | 586 | 815 | CS000503 | 778 | 855 |
| AC000419 | AM11196-AS | 587 | 830 | CS000505 | 779 | 873 |
| AC000420 | AM10723-AS | 564 | 7 | CS000507 | 780 | 874 |
| AC000438 | AM10308-AS | 2 | 7 | CS000531 | 781 | 858 |
| AC000439 | AM10723-AS | 564 | 7 | CS000499 | 777 | 19 |
| AC000440 | AM10309-AS | 3 | 7 | CS000531 | 781 | 858 |
| AC000441 | AM11188-AS | 582 | 7 | CS000499 | 777 | 19 |
| AC000442 | AM10723-AS | 564 | 7 | CS000497 | 776 | 858 |
| AC000549 | AM10309-AS | 3 | 7 | CS000672 | 782 | 19 |
| AC000550 | AM10309-AS | 3 | 7 | CS000673 | 783 | 19 |
| AC000551 | AM10309-AS | 3 | 7 | CS000674 | 784 | 19 |
| AC000552 | AM10309-AS | 3 | 7 | CS000675 | 785 | 19 |
| AC000567 | AM10309-AS | 3 | 7 | CS000690 | 786 | 19 |
| AC000568 | AM10309-AS | 3 | 7 | CS000691 | 787 | 19 |
| AC000790 | AM10717-AS | 561 | 815 | CS000986 | 788 | 855 |
| AC000791 | AM10308-AS | 2 | 7 | CS000988 | 789 | 856 |
| AC000792 | AM10308-AS | 2 | 7 | CS000989 | 790 | 857 |
| AC000793 | AM10720-AS | 562 | 7 | CS000363 | 10 | 19 |
| AC000794 | AM10722-AS | 563 | 7 | CS000363 | 10 | 19 |
| AC000795 | AM10723-AS | 564 | 7 | CS000363 | 10 | 19 |
| AC000796 | AM10724-AS | 565 | 7 | CS000363 | 10 | 19 |
| AC000818 | AM10311-AS | 543 | 801 | CS001021 | 791 | 839 |
| AC000819 | AM10312-AS | 544 | 801 | CS001021 | 791 | 839 |
| AC000820 | AM10314-AS | 545 | 802 | CS001024 | 792 | 840 |
| AC000821 | AM10315-AS | 546 | 802 | CS001024 | 792 | 840 |
| AC000822 | AM10317-AS | 547 | 803 | CS001027 | 793 | 841 |
| AC000823 | AM10318-AS | 548 | 803 | CS001027 | 793 | 841 |
| AC001134 | AM11762-AS | 593 | 7 | CS000499 | 777 | 19 |
| AC001266 | AM11897-AS | 5 | 9 | CS001579 | 11 | 20 |
| AC001267 | AM11898-AS | 6 | 9 | CS001579 | 11 | 20 |
| AC001268 | AM10754-AS | 4 | 8 | CS001582 | 12 | 21 |
| AC001274 | AM11757-AS | 588 | 7 | CS000499 | 777 | 19 |
| AC001653 | AM14090-AS | 614 | 7 | CS000499 | 777 | 19 |
| AC001654 | AM14091-AS | 615 | 7 | CS000499 | 777 | 19 |
| AC001655 | AM14091-AS | 615 | 7 | CS002138 | 796 | 19 |
| AC001877 | AM11897-AS | 5 | 9 | CS002399 | 797 | 20 |
| AC002047 | AM15021-AS | 619 | 830 | CS000505 | 779 | 873 |
| AC002345 | AM15767-AS | 620 | 837 | CS002976 | 798 | 887 |
| AC002347 | AM15770-AS | 621 | 801 | CS001021 | 791 | 839 |
| AC002399 | AM10309-AS | 3 | 7 | CS003048 | 799 | 19 |

TABLE 9A
Conjugate Duplex ID Numbers Referencing Position
Targeted On AGER (RAGE) Gene

| | | | Targeted AGER Gene |
|---|---|---|---|
| | | | Position |
| Duplex | AS ID | SS ID | (Of SEQ ID NO: 1) |
| AC000286 | AM10308-AS | CS000363 | 177 |
| AC000287 | AM10309-AS | CS000363 | 177 |
| AC000288 | AM11103-AS | CS000363 | 177 |
| AC000289 | AM11104-AS | CS000363 | 177 |
| AC000290 | AM11104-AS | CS000368 | 177 |
| AC000291 | AM11104-AS | CS000369 | 177 |
| AC000292 | AM10309-AS | CS000363 | 177 |
| AC000293 | AM11103-AS | CS000363 | 177 |
| AC000294 | AM11104-AS | CS000363 | 177 |
| AC000312 | AM11104-AS | CS000386 | 177 |
| AC000414 | AM11188-AS | CS000497 | 177 |
| AC000415 | AM11190-AS | CS000499 | 177 |
| AC000416 | AM11191-AS | CS000499 | 177 |
| AC000417 | AM11192-AS | CS000499 | 177 |
| AC000418 | AM11194-AS | CS000503 | 177 |
| AC000419 | AM11196-AS | CS000505 | 177 |
| AC000420 | AM10723-AS | CS000507 | 177 |
| AC000438 | AM10308-AS | CS000531 | 177 |
| AC000439 | AM10723-AS | CS000499 | 177 |
| AC000440 | AM10309-AS | CS000531 | 177 |
| AC000441 | AM11188-AS | CS000499 | 177 |
| AC000442 | AM10723-AS | CS000497 | 177 |
| AC000549 | AM10309-AS | CS000672 | 177 |
| AC000550 | AM10309-AS | CS000673 | 177 |
| AC000551 | AM10309-AS | CS000674 | 177 |
| AC000552 | AM10309-AS | CS000675 | 177 |
| AC000567 | AM10309-AS | CS000690 | 177 |
| AC000568 | AM10309-AS | CS000691 | 177 |
| AC000790 | AM10717-AS | CS000986 | 177 |
| AC000791 | AM10308-AS | CS000988 | 177 |
| AC000792 | AM10308-AS | CS000989 | 177 |
| AC000793 | AM10720-AS | CS000363 | 177 |
| AC000794 | AM10722-AS | CS000363 | 177 |
| AC000795 | AM10723-AS | CS000363 | 177 |
| AC000796 | AM10724-AS | CS000363 | 177 |
| AC000818 | AM10311-AS | CS001021 | 178 |
| AC000819 | AM10312-AS | CS001021 | 178 |
| AC000820 | AM10314-AS | CS001024 | 384 |
| AC000821 | AM10315-AS | CS001024 | 384 |
| AC000822 | AM10317-AS | CS001027 | 391 |
| AC000823 | AM10318-AS | CS001027 | 391 |
| AC001134 | AM11762-AS | CS000499 | 177 |
| AC001266 | AM11897-AS | CS001579 | 90 |
| AC001267 | AM11898-AS | CS001579 | 90 |
| AC001268 | AM10754-AS | CS001582 | 330 |
| AC001274 | AM11757-AS | CS000499 | 177 |
| AC001653 | AM14090-AS | CS000499 | 177 |
| AC001654 | AM14091-AS | CS000499 | 177 |
| AC001655 | AM14091-AS | CS002138 | 177 |
| AC001877 | AM11897-AS | CS002399 | 90 |
| AC002047 | AM15021-AS | CS000505 | 177 |
| AC002345 | AM15767-AS | CS002976 | 392 |
| AC002347 | AM15770-AS | CS001021 | 178 |
| AC002399 | AM10309-AS | CS003048 | 177 |

TABLE 9B
Conjugate ID Numbers and Corresponding AD Duplex Numbers,
Referencing Position Targeted On RAGE (AGER) Gene

| | Corresponding | Targeted AGER |
|---|---|---|
| AC Duplex | AD Duplex | Gene Position |
| Number | Number | (Of SEQ ID NO: 1) |
| AC000286 | AD07474 | 177 |
| AC000287 | AD07475 | 177 |
| AC000288 | AD07972 | 177 |
| AC000289 | AD07973 | 177 |
| AC000290 | AD07974 | 177 |
| AC000291 | AD07975 | 177 |
| AC000292 | AD07475 | 177 |
| AC000293 | AD07972 | 177 |
| AC000294 | AD07973 | 177 |
| AC000312 | AD07976 | 177 |
| AC000414 | AD08033 | 177 |
| AC000415 | AD08034 | 177 |
| AC000416 | AD08035 | 177 |
| AC000417 | AD08036 | 177 |
| AC000418 | AD08037 | 177 |
| AC000419 | AD08038 | 177 |
| AC000420 | AD08039 | 177 |
| AC000438 | AD07704 | 177 |
| AC000439 | AD07708 | 177 |
| AC000440 | AD08030 | 177 |
| AC000441 | AD08031 | 177 |
| AC000442 | AD08032 | 177 |
| AC000549 | AD08260 | 177 |
| AC000550 | AD08261 | 177 |
| AC000551 | AD08262 | 177 |
| AC000552 | AD08263 | 177 |
| AC000567 | AD08260 | 177 |
| AC000568 | AD08261 | 177 |
| AC000790 | AD07700 | 177 |
| AC000791 | AD07701 | 177 |
| AC000792 | AD07702 | 177 |
| AC000793 | AD07703 | 177 |
| AC000794 | AD07705 | 177 |
| AC000795 | AD07706 | 177 |
| AC000796 | AD07707 | 177 |
| AC000818 | AD07476 | 178 |
| AC000819 | AD07477 | 178 |
| AC000820 | AD07478 | 384 |
| AC000821 | AD07479 | 384 |
| AC000822 | AD07480 | 391 |
| AC000823 | AD07481 | 391 |
| AC001134 | AD08437 | 177 |
| AC001266 | AD09150 | 90 |
| AC001267 | AD09151 | 90 |
| AC001268 | AD09152 | 330 |
| AC001274 | AD08432 | 177 |
| AC001653 | AD09870 | 177 |
| AC001654 | AD09871 | 177 |
| AC001655 | AD09872 | 177 |
| AC001877 | AD10075 | 90 |
| AC002047 | AD10543 | 177 |
| AC002345 | AD11078 | 392 |
| AC002347 | AD11080 | 178 |
| AC002399 | AD11353 | 177 |

TABLE 10
Conjugate ID Numbers With Chemically Modified Antisense and Sense Strands (including Linkers and Conjugates)

| | | SEQ | | SEQ |
|---|---|---|---|---|
| AC ID | Sense Strand (Fully Modified | ID | | ID |
| Number | with Conjugated Targeting Ligand) (5′→3′) | NO: | Antisense Strand (5′→3′) | NO: |
| AC000286 | Tri-SM6.1-avβ6-(TA14)csggaauggAfAfAfcugaacacaas(invAb) | 10 | usUfsgsUfgUfuCfaGfuUfuCfcAfuUfcCfsg | 2 |
| AC000287 | Tri-SM6.1-avβ6-(TA14)csggaauggAfAfAfcugaacacaas(invAb) | 10 | cPrpusUfsgsUfgUfuCfaGfuUfuCfcAfuUfcCfsg | 3 |
| AC000288 | Tri-SM6.1-avβ6-(TA14)csggaauggAfAfAfcugaacacaas(invAb) | 10 | cPrpusUfgUfgUfuCfaGfuUfuCfcAfuUfcCfsg | 580 |
| AC000289 | Tri-SM6.1-avβ6-(TA14)csggaauggAfAfAfcugaacacaas(invAb) | 10 | cPrpuUfgUfgUfuCfaGfuUfuCfcAfuUfcCfsg | 581 |
| AC000290 | Tri-SM6.1-avβ6-(TA14)cggaauggAfAfAfcugaacacaas(invAb) | 773 | cPrpuUfgUfgUfuCfaGfuUfuCfcAfuUfcCfsg | 581 |
| AC000291 | Tri-SM6.1-avβ6-(TA14)csggaauggAfAfAfcugaacacaa(invAb) | 774 | cPrpuUfgUfgUfuCfaGfuUfuCfcAfuUfcCfsg | 581 |
| AC000292 | Tri-SM6.1-avβ6-(TA14)csggaauggAfAfAfcugaacacaas(invAb) | 10 | cPrpusUfsgsUfgUfuCfaGfuUfuCfcAfuUfcCfsg | 3 |
| AC000293 | Tri-SM6.1-avβ6-(TA14)csggaauggAfAfAfcugaacacaas(invAb) | 10 | cPrpusUfgUfgUfuCfaGfuUfuCfcAfuUfcCfsg | 580 |
| AC000294 | Tri-SM6.1-avβ6-(TA14)csggaauggAfAfAfcugaacacaas(invAb) | 10 | cPrpuUfgUfgUfuCfaGfuUfuCfcAfuUfcCfsg | 581 |
| AC000312 | Tri-SM6.1-avβ6-(TA14)cggaauggAfAfAfcugaacacaa(invAb) | 775 | cPrpuUfgUfgUfuCfaGfuUfuCfcAfuUfcCfsg | 581 |
| AC000414 | Tri-SM6.1-avβ6-(TA14)csggaauGfgAfaAfcugaauacaas(invAb) | 776 | cPrpusUfsgsuguucaguUfuCfcAfuuccsg | 582 |
| AC000415 | Tri-SM6.1-avβ6-(TA14)csggaauGfgAfaAfcugaacacaas(invAb) | 777 | usUfsgsuguuC_{UNA}aguUfuCfcAfuuccsg | 583 |
| AC000416 | Tri-SM6.1-avβ6-(TA14)csggaauGfgAfaAfcugaacacaas(invAb) | 777 | usUfsgsuguU_{UNA}caguUfuCfcAfuuccsg | 584 |
| AC000417 | Tri-SM6.1-avβ6-(TA14)csggaauGfgAfaAfcugaacacaas(invAb) | 777 | usUfsgsugU_{UNA}UcaguUfuCfcAfuuccsg | 585 |
| AC000418 | Tri-SM6.1-avβ6-(TA14)gsggaauGfgAfaAfcugaacacaas(invAb) | 778 | usUfsgsuguucaguUfuCfcAfuuccsc | 586 |
| AC000419 | Tri-SM6.1-avβ6-(TA14)usggaauGfgAfaAfcugaacacaas(invAb) | 779 | usUfsgsuguucaguUfuCfcAfuuccsa | 587 |
| AC000420 | Tri-SM6.1-avβ6-(TA14)csggaauGfgAfa_2NAfcugaacacaas(invAb) | 780 | usUfsgsuguucaguUfuCfcAfuuccsg | 564 |
| AC000438 | Tri-SM6.1-avβ6-(TA14)csggaauggAfAfAfcugaauacaas(invAb) | 781 | usUfsgsUfgUfuCfaGfuUfuCfcAfuUfcCfsg | 2 |
| AC000439 | Tri-SM6.1-avβ6-(TA14)csggaauGfgAfaAfcugaacacaas(invAb) | 777 | usUfsgsuguucaguUfuCfcAfuuccsg | 564 |
| AC000440 | Tri-SM6.1-avβ6-(TA14)csggaauggAfAfAfcugaauacaas(invAb) | 781 | cPrpusUfsgsUfgUfuCfaGfuUfuCfcAfuUfcCfsg | 3 |
| AC000441 | Tri-SM6.1-avβ6-(TA14)csggaauGfgAfaAfcugaacacaas(invAb) | 777 | cPrpusUfsgsuguucaguUfuCfcAfuuccsg | 582 |
| AC000442 | Tri-SM6.1-avβ6-(TA14)csggaauGfgAfaAfcugaauacaas(invAb) | 776 | usUfsgsuguucaguUfuCfcAfuuccsg | 564 |
| AC000549 | avβ6-SM6.1-L6-C6-csggaauggAfAfAfcugaacacaas(invAb) | 782 | cPrpusUfsgsUfgUfuCfaGfuUfuCfcAfuUfcCfsg | 3 |
| AC000550 | avβ6-SM6.1-L6-C6s-(invAb)scggaauggAfAfAfcugaacacaas(invAb) | 783 | cPrpusUfsgsUfgUfuCfaGfuUfuCfcAfuUfcCfsg | 3 |
| AC000551 | avβ6-SM6.1-Alk-cyHex-csggaauggAfAfAfcugaacacaas(invAb) | 784 | cPrpusUfsgsUfgUfuCfaGfuUfuCfcAfuUfcCfsg | 3 |
| AC000552 | avβ6-SM6.1-Alk-cyHexs-(invAb)scggaauggAfAfAfcugaacacaas(invAb) | 785 | cPrpusUfsgsUfgUfuCfaGfuUfuCfcAfuUfcCfsg | 3 |
| AC000567 | av6-pep1-C6-csggaauggAfAfAfcugaacacaas(invAb) | 786 | cPrpusUfsgsUfgUfuCfaGfuUfuCfcAfuUfcCfsg | 3 |
| AC000568 | avβ6-pepl-C6s-(invAb)scggaauggAfAfAfcugaacacaas(invAb) | 787 | cPrpusUfsgsUfgUfuCfaGfuUfuCfcAfuUfcCfsg | 3 |
| AC000790 | Tri-SM6.1-avβ6-(TA14)gsggaauggAfAfAfcugaacacaas(invAb) | 788 | usUfsgsUfgUfuCfaGfuUfuCfcAfuUfcCfsc | 561 |
| AC000791 | Tri-SM6.1-avβ6-(TA14)csggaauggAfAfAfcuiaacacaas(invAb) | 789 | usUfsgsUfgUfuCfaGfuUfuCfcAfuUfcCfsg | 2 |
| AC000792 | Tri-SM6.1-avβ6-(TA14)csggaauggAfa_2NAfcuiaacacaas(invAb) | 790 | usUfsgsUfgUfuCfaGfuUfuCfcAfuUfcCfsg | 2 |
| AC000793 | Tri-SM6.1-avβ6-(TA14)csggaauggAfAfAfcugaacacaas(invAb) | 10 | usUfsgsUfgUfU_{UNA}CfaGfuUfuCfcAfuUfcCfsg | 562 |
| AC000794 | Tri-SM6.1-avβ6-(TA14)csggaauggAfAfAfcugaacacaas(invAb) | 10 | usUfsgsUfgUfucaguUfuCfcAfuUfcCfsg | 563 |
| AC000795 | Tri-SM6.1-avβ6-(TA14)csggaauggAfAfAfcugaacacaas(invAb) | 10 | usUfsgsuguucaguUfuCfcAfuuccsg | 564 |
| AC000796 | Tri-SM6.1-avβ6-(TA14)csggaauggAfAfAfcugaacacaas(invAb) | 10 | usUfsgsuguucaGfuUfuCfcAfuuccsg | 565 |
| AC000818 | Tri-SM6.1-avβ6-(TA14)gsgaauggaAfAfCfugaacacaias(invAb) | 791 | usCfsusGfuGfuUfcAfgUfuUfcCfaUfuCfsc | 543 |
| AC000819 | Tri-SM6.1-avβ6-(TA14)gsgaauggaAfAfCfugaacacaias(invAb) | 791 | cPrpusCfsusGfuGfuUfcAfgUfuUfcCfaUfuCfsc | 544 |
| AC000820 | Tri-SM6.1-avβ6-(TA14)asccagauuCfCfUfgggaaiccaas(invAb) | 792 | usUfsgsGfcUfuCfcCfaGfgAfaUfcUfgGfsu | 545 |
| AC000821 | Tri-SM6.1-avβ6-(TA14)asccagauuCfCfUfgggaaiccaas(invAb) | 792 | cPrpusUfsgsGfcUfuCfcCfaGfgAfaUfcUfgGfsu | 546 |
| AC000822 | Tri-SM6.1-avβ6-(TA14)usccugggaAfGfCfcagaaauugus(invAb) | 793 | asCfsasAfuUfuCfuGfgCfuUfcCfcAfgGfsa | 547 |
| AC000823 | Tri-SM6.1-av6-(TA14)usccugggaAfGfCfcagaaauugus(invAb) | 793 | cPrpasCfsasAfuUfuCfuGfgCfuUfcCfcAfgGfsa | 548 |
| AC001134 | Tri-SM6.1-avβ6-(TA14)csggaauGfgAfaAfcugaacacaas(invAb) | 777 | cPrpusUfsgsuguU_{UNA}caguUfuCfcAfuuccsg | 593 |
| AC001266 | Tri-SM6.1-avβ6-(TA14)gsaguagGfuGfcUfcaaaacaucas(invAb) | 11 | usGfsasuguuuugaGfcAfcCfuacusc | 5 |
| AC001267 | Tri-SM6.1-avβ6-(TA14)gsaguagGfuGfcUfcaaaacaucas(invAb) | 11 | cPrpusGfsasuguuuugaGfcAfcCfuacusc | 6 |
| AC001268 | Tri-SM6.1-avβ6-(TA14)asggcaaugAfAfCfaggaauigaas(invAb) | 12 | usUfscsCfaUfuCfcUfgUfuCfaUfuGfcCfsu | 4 |
| AC001274 | Tri-SM6.1-avβ6-(TA14)csggaauGfgAfaAfcugaacacaas(invAb) | 777 | cPrpuUfguguucaguUfuCfcAfuuccsg | 588 |
| AC001653 | Tri-SM6.1-avβ6-(TA14)csggaauGfgAfaAfcugaacacaas(invAb) | 777 | usUfsgsUfguucaguUfuCfcAfuuccsg | 614 |
| AC001654 | Tri-SM6.1-avβ6-(TA14)csggaauGfgAfaAfcugaacacaas(invAb) | 777 | usUfsgsuguUfcaguUfuCfcAfuuccsg | 615 |
| AC001655 | Tri-SM6.1-avβ6-(TA14)csggaauggAfaAfcUfgaacacaas(invAb) | 796 | usUfsgsuguUfcaguUfuCfcAfuuccsg | 615 |
| AC001877 | Tri-SM6.1-avβ6-(TA14)gsaguagGfuGfcUfcaaaacauca(invAb) | 797 | usGfsasuguuuugaGfcAfcCfuacusc | 5 |
| AC002047 | Tri-SM6.1-avβ6-(TA14)usggaauGfgAfaAfcugaacacaas(invAb) | 779 | cPrpusUfsgsuguucaguUfuCfcAfuuccsa | 619 |
| AC002345 | Tri-SM6.1-avβ6-(TA14)cscugggaaGfCfCfagaaauuguas(invAb) | 798 | cPrpusAfscsAfaUfuucugGfcUfuCfcCfagsg | 620 |
| AC002347 | Tri-SM6.1-avβ6-(TA14)gsgaauggaAfAfCfugaacacaias(invAb) | 791 | cPrpusCfsusGfuGfuucagUfuUfcCfaUfucsc | 621 |
| AC002399 | Tri-SM6.1-avβ6-(TA14)scsggaauggAfAfAfcugaacacaas(invAb) | 799 | cPrpusUfsgsUfgUfuCfaGfuUfuCfcAfuUfcCfsg | 3 |

[0230] In some embodiments, a RAGE RNAi agent is prepared or provided as a salt, mixed salt, or a free-acid. In some embodiments, a RAGE RNAi agent is prepared or provided as a pharmaceutically acceptable salt. In some embodiments, a RAGE RNAi agent is prepared or provided as a pharmaceutically acceptable sodium or potassium salt The RNAi agents described herein, upon delivery to a cell expressing an AGER gene, inhibit or knockdown expression of one or more AGER genes in vivo and/or in vitro.

### Targeting Groups, Linking Groups, Pharmacokinetic/Pharmacodynamic (PK/PD) Modulators, and Delivery Vehicles

[0231] In some embodiments, a RAGE RNAi agent contains or is conjugated to one or more non-nucleotide groups including, but not limited to, a targeting group, a linking group, a pharmacokinetic/pharmacodynamic (PK/PD) modulator, a delivery polymer, or a delivery vehicle. The non-nucleotide group can enhance targeting, delivery, or attachment of the RNAi agent. The non-nucleotide group can be covalently linked to the 3′ and/or 5′ end of either the sense strand and/or the antisense strand. In some embodiments, a RAGE RNAi agent contains a non-nucleotide group linked to the 3′ and/or 5′ end of the sense strand. In some embodiments, a non-nucleotide group is linked to the 5′ end of a RAGE RNAi agent sense strand. A non-nucleotide group can be linked directly or indirectly to the RNAi agent via a linker/linking group. In some embodiments, a non-nucleotide group is linked to the RNAi agent via a labile, cleavable, or reversible bond or linker.

[0232] In some embodiments, a non-nucleotide group enhances the pharmacokinetic or biodistribution properties of an RNAi agent or conjugate to which it is attached to improve cell- or tissue-specific distribution and cell-specific uptake of the conjugate. In some embodiments, a non-nucleotide group enhances endocytosis of the RNAi agent.

[0233] Targeting groups or targeting moieties enhance the pharmacokinetic or biodistribution properties of a conjugate or RNAi agent to which they are attached to improve cell-specific (including, in some cases, organ specific) distribution and cell-specific (or organ specific) uptake of the conjugate or RNAi agent. A targeting group can be monovalent, divalent, trivalent, tetravalent, or have higher valency for the target to which it is directed. Representative targeting groups include, without limitation, compounds with affinity to cell surface molecule, cell receptor ligands, hapten, antibodies, monoclonal antibodies, antibody fragments, and antibody mimics with affinity to cell surface molecules. In some embodiments, a targeting group is linked to an RNAi agent using a linker, such as a PEG linker or one, two, or three abasic and/or ribitol (abasic ribose) residues, which in some instances can serve as linkers.

[0234] A targeting group, with or without a linker, can be attached to the 5′ or 3′ end of any of the sense and/or antisense strands disclosed in Tables 2, 3, 4, 5, 6, and 10. A linker, with or without a targeting group, can be attached to the 5′ or 3′ end of any of the sense and/or antisense strands disclosed in Tables 2, 3, 4, 5, 6, and 10.

[0235] The RAGE RNAi agents described herein can be synthesized having a reactive group, such as an amino group (also referred to herein as an amine), at the 5′-terminus and/or the 3′-terminus. The reactive group can be used subsequently to attach a targeting moiety using methods typical in the art.

[0236] For example, in some embodiments, the RAGE RNAi agents disclosed herein are synthesized having an NH₂-C₆ group at the 5′-terminus of the sense strand of the RNAi agent. The terminal amino group subsequently can be reacted to form a conjugate with, for example, a group that includes an αvβ6 integrin targeting ligand. In some embodiments, the RAGE RNAi agents disclosed herein are synthesized having one or more alkyne groups at the 5′-terminus of the sense strand of the RNAi agent. The terminal alkyne group(s) can subsequently be reacted to form a conjugate with, for example, a group that includes an αvβ6 integrin targeting ligand.

[0237] In some embodiments, a targeting group comprises an integrin targeting ligand. In some embodiments, an integrin targeting ligand is an αvβ6 integrin targeting ligand. The use of an αvβ6 integrin targeting ligand facilitates cell-specific targeting to cells having αvβ6 on its respective surface, and binding of the integrin targeting ligand can facilitate entry of the therapeutic agent, such as an RNAi agent, to which it is linked, into cells such as epithelial cells, including pulmonary epithelial cells and renal epithelial cells. Integrin targeting ligands can be monomeric or monovalent (e.g., having a single integrin targeting moiety) or multimeric or multivalent (e.g., having multiple integrin targeting moieties). The targeting group can be attached to the 3′ and/or 5′ end of the RNAi oligonucleotide using methods known in the art. The preparation of targeting groups, such as αvβ6 integrin targeting ligands, is described, for example, in International Patent Application Publication No. WO 2018/085415 and in International Patent Application Publication No. WO 2019/089765, the contents of each of which are incorporated herein in its entirety.

[0238] In some embodiments, targeting groups are linked to the RAGE RNAi agents without the use of an additional linker. In some embodiments, the targeting group is designed having a linker readily present to facilitate the linkage to a RAGE RNAi agent. In some embodiments, when two or more RNAi agents are included in a composition, the two or more RNAi agents can be linked to their respective targeting groups using the same linkers. In some embodiments, when two or more RNAi agents are included in a composition, the two or more RNAi agents are linked to their respective targeting groups using different linkers.

[0239] In some embodiments, a linking group is conjugated to the RNAi agent. The linking group facilitates covalent linkage of the agent to a targeting group, pharmacokinetic modulator, delivery polymer, or delivery vehicle. The linking group can be linked to the 3′ and/or the 5′ end of the RNAi agent sense strand or antisense strand. In some embodiments, the linking group is linked to the RNAi agent sense strand. In some embodiments, the linking group is conjugated to the 5′ or 3′ end of an RNAi agent sense strand. In some embodiments, a linking group is conjugated to the 5′ end of an RNAi agent sense strand. Examples of linking groups, include but are not limited to: C6-SS-C6, 6-SS-6, reactive groups such a primary amines (e.g., NH2-C6) and alkynes, alkyl groups, abasic residues/nucleotides, amino acids, tri-alkyne functionalized groups, ribitol, and/or PEG groups. Examples of certain linking groups are provided in Table 11.

[0240] A linker or linking group is a connection between two atoms that links one chemical group (such as an RNAi agent) or segment of interest to another chemical group (such as a targeting group, pharmacokinetic modulator, or delivery polymer) or segment of interest via one or more covalent bonds. A labile linkage contains a labile bond. A linkage can optionally include a spacer that increases the distance between the two joined atoms. A spacer may further add flexibility and/or length to the linkage. Spacers include, but are not limited to, alkyl groups, alkenyl groups, alkynyl groups, aryl groups, aralkyl groups, aralkenyl groups, and aralkynyl groups; each of which can contain one or more heteroatoms, heterocycles, amino acids, nucleotides, and saccharides. Spacer groups are well known in the art and the preceding list is not meant to limit the scope of the description. In some embodiments, a RAGE RNAi agent is conjugated to a polyethylene glycol (PEG) moiety, or to a hydrophobic group having 12 or more carbon atoms, such as a cholesterol or palmitoyl group.

[0241] In some embodiments, a RAGE RNAi agent is linked to one or more pharmacokinetic/pharmacodynamic (PK/PD) modulators. PK/PD modulators can increase circulation time of the conjugated drug and/or increase the activity of the RNAi agent through improved cell receptor binding, improved cellular uptake, and/or other means. Various PK/PD modulators suitable for use with RNAi agents are known in the art. In some embodiments, the PK/PD modulatory can be cholesterol or cholesteryl derivatives, or in some circumstances a PK/PD modulator can be comprised of alkyl groups, alkenyl groups, alkynyl groups, aryl groups, aralkyl groups, aralkenyl groups, or aralkynyl groups, each of which may be linear, branched, cyclic, and/or substituted or unsubstituted. In some embodiments, the location of attachment for these moieties is at the 5′ or 3′ end of the sense strand, at the 2′ position of the ribose ring of any given nucleotide of the sense strand, and/or attached to the phosphate or phosphorothioate backbone at any position of the sense strand.

[0242] Any of the RAGE RNAi agent nucleotide sequences listed in Tables 2, 3, 4, 5, 6, and 10, whether modified or unmodified, can contain 3′ and/or 5′ targeting group(s), linking group(s), and/or PK/PD modulator(s). Any of the RAGE RNAi agent sequences listed in Tables 3, 4, 5, 6, and 10, or are otherwise described herein, which contain a 3′ or 5′ targeting group, linking group, and/or PK/PD modulator can alternatively contain no 3′ or 5′ targeting group, linking group, or PK/PD modulator, or can contain a different 3′ or 5′ targeting group, linking group, or pharmacokinetic modulator including, but not limited to, those depicted in Table 11. Any of the RAGE RNAi agent duplexes listed in Tables 7A, 7B, 8, 9A, 9B, and 10, whether modified or unmodified, can further comprise a targeting group or linking group, including, but not limited to, those depicted in Table 11, and the targeting group or linking group can be attached to the 3′ or 5′ terminus of either the sense strand or the antisense strand of the RAGE RNAi agent duplex.

[0243] Examples of certain modified nucleotides, capping moieties, and linking groups are provided in Table 11.

TABLE 11
Structures Representing Various Modified Nucleotides, Capping Moieties, Targeting
Ligands and Targeting and Linking Groups (wherein [symbol] indicates the point of connection)

[chemical structure]

[chemical structure]

[chemical structure]

[chemical structure]

[chemical structure]

[chemical structure]

When positioned internally:

[chemical structure]

When positioned internally:

[chemical structure]

When positioned at the 3′ terminal end:

[chemical structure]

When positioned at the 3′ terminal end:

[chemical structure]

When positioned internally:

[chemical structure]

When positioned at the 3′ terminal end:

[chemical structure]

When positioned internally:

[chemical structure]

[chemical structure]

[chemical structure]

[chemical structure]

[chemical structure]

[chemical structure]

[chemical structure]

[chemical structure]

[chemical structure]

[chemical structure]

[chemical structure]

[chemical structure]

[chemical structure]

[chemical structure]

[chemical structure]

[chemical structure]

[chemical structure]

[chemical structure]

[chemical structure]

[chemical structure]

[chemical structure]

[chemical structure]

[chemical structure]

[chemical structure]

[chemical structure]

[0244] Alternatively, other linking groups known in the art may be used. In many instances, linking groups can be commercially acquired or alternatively, are incorporated into commercially available nucleotide phosphoramidites. (See, e.g., International Patent Application Publication No. WO 2019/161213, which is incorporated herein by reference in its entirety).

[0245] In some embodiments, a RAGE RNAi agent is delivered without being conjugated to a targeting ligand or pharmacokinetic/pharmacodynamic (PK/PD) modulator (referred to as being “naked” or a “naked RNAi agent”).

[0246] In some embodiments, a RAGE RNAi agent is conjugated to a targeting group, a linking group, a PK modulator, and/or another non-nucleotide group to facilitate delivery of the RAGE RNAi agent to the cell or tissue of choice, for example, to an epithelial cell in vivo. In some embodiments, a RAGE RNAi agent is conjugated to a targeting group wherein the targeting group includes an integrin targeting ligand. In some embodiments, the integrin targeting ligand is an αvβ6 integrin targeting ligand. In some embodiments, a targeting group includes one or more αvβ6 integrin targeting ligands.

[0247] In some embodiments, a delivery vehicle may be used to deliver an RNAi agent to a cell or tissue. A delivery vehicle is a compound that improves delivery of the RNAi agent to a cell or tissue. A delivery vehicle can include, or consist of, but is not limited to: a polymer, such as an amphipathic polymer, a membrane active polymer, a peptide, a melittin peptide, a melittin-like peptide (MLP), a lipid, a reversibly modified polymer or peptide, or a reversibly modified membrane active polyamine.

[0248] In some embodiments, the RNAi agents can be combined with lipids, nanoparticles, polymers, liposomes, micelles, DPCs or other delivery systems available in the art for nucleic acid delivery. The RNAi agents can also be chemically conjugated to targeting groups, lipids (including, but not limited to cholesteryl and cholesteryl derivatives), encapsulating in nanoparticles, liposomes, micelles, conjugating to polymers or DPCs (see, for example WO 2000/053722, WO 2008/022309, WO 2011/104169, and WO 2012/083185, WO 2013/032829, WO 2013/158141, each of which is incorporated herein by reference), by iontophoresis, or by incorporation into other delivery vehicles or systems available in the art such as hydrogels, cyclodextrins, biodegradable nanocapsules, bioadhesive microspheres, or proteinaceous vectors. In some embodiments the RNAi agents can be conjugated to antibodies having affinity for pulmonary epithelial cells. In some embodiments, the RNAi agents can be linked to targeting ligands that have affinity for pulmonary epithelial cells or receptors present on pulmonary epithelial cells.

### Pharmaceutical Compositions and Formulations

[0249] The RAGE RNAi agents disclosed herein can be prepared as pharmaceutical compositions or formulations (also referred to herein as “medicaments”). In some embodiments, pharmaceutical compositions include at least one RAGE RNAi agent. These pharmaceutical compositions are particularly useful in the inhibition of the expression of AGER mRNA in a target cell, a group of cells, a tissue, or an organism. The pharmaceutical compositions can be used to treat a subject having a disease, disorder, or condition that would benefit from reduction in the level of the target mRNA, or inhibition in expression of the target gene. The pharmaceutical compositions can be used to treat a subject at risk of developing a disease or disorder that would benefit from reduction of the level of the target mRNA or an inhibition in expression the target gene. In one embodiment, the method includes administering a RAGE RNAi agent linked to a targeting ligand as described herein, to a subject to be treated. In some embodiments, one or more pharmaceutically acceptable excipients (including vehicles, carriers, diluents, and/or delivery polymers) are added to the pharmaceutical compositions that include a RAGE RNAi agent, thereby forming a pharmaceutical formulation or medicament suitable for in vivo delivery to a subject, including a human.

[0250] The pharmaceutical compositions that include a RAGE RNAi agent and methods disclosed herein decrease the level of the target mRNA in a cell, group of cells, group of cells, tissue, organ, or subject, including by administering to the subject a therapeutically effective amount of a herein described RAGE RNAi agent, thereby inhibiting the expression of AGER mRNA in the subject. In some embodiments, the subject has been previously identified or diagnosed as having a disease or disorder that can be mediated at least in part by a reduction in RAGE expression. In some embodiments, the subject has been previously diagnosed with having one or more pulmonary diseases such as asthma (including severe asthma), acute respiratory distress syndrome, idiopathic pulmonary fibrosis, chronic obstructive pulmonary disease (COPD), cystic fibrosis, pneumonia, lung cancer, or bronchopulmonary dysplasia. In some embodiments the pulmonary diseases is severe asthma.

[0251] In some embodiments the subject has been previously diagnosed with having cardiovascular disease (atherosclerosis, myocardial infarction, heart failure, peripheral vascular disease), cancer diabetes, chronic kidney disease, neurodegenerative disease, rheumatoid arthritis, non-alcoholic steatohepatitis, injury caused by certain viral infections including SARS-CoV-2, certain ocular inflammatory conditions, or skeletal muscle wasting.

[0252] In some embodiments, the subject has been previously diagnosed with having one or more ocular diseases related to ocular inflammation.

[0253] Embodiments of the present disclosure include pharmaceutical compositions for delivering a RAGE RNAi agent to a pulmonary epithelial cell in vivo. Such pharmaceutical compositions can include, for example, a RAGE RNAi agent conjugated to a targeting group that comprises an integrin targeting ligand. In some embodiments, the integrin targeting ligand is comprised of an αvβ6 integrin ligand.

[0254] In some embodiments, the described pharmaceutical compositions including a RAGE RNAi agent are used for treating or managing clinical presentations in a subject that would benefit from the inhibition of expression of RAGE. In some embodiments, a therapeutically or prophylactically effective amount of one or more of pharmaceutical compositions is administered to a subject in need of such treatment. In some embodiments, administration of any of the disclosed RAGE RNAi agents can be used to decrease the number, severity, and/or frequency of symptoms of a disease in a subject.

[0255] In some embodiments, the described RAGE RNAi agents are optionally combined with one or more additional (i.e., second, third, etc.) therapeutics. A second therapeutic can be another RAGE RNAi agent (e.g., a RAGE RNAi agent that targets a different sequence within an AGER (RAGE) gene). In some embodiments, a second therapeutic can be an RNAi agent that targets the AGER gene. An additional therapeutic can also be a small molecule drug, antibody, antibody fragment, and/or aptamer. The RAGE RNAi agents, with or without the one or more additional therapeutics, can be combined with one or more excipients to form pharmaceutical compositions.

[0256] The described pharmaceutical compositions that include a RAGE RNAi agent can be used to treat at least one symptom in a subject having a disease or disorder that would benefit from reduction or inhibition in expression of AGER mRNA. In some embodiments, the subject is administered a therapeutically effective amount of one or more pharmaceutical compositions that include a RAGE RNAi agent thereby treating the symptom. In other embodiments, the subject is administered a prophylactically effective amount of one or more RAGE RNAi agents, thereby preventing or inhibiting the at least one symptom.

[0257] In some embodiments, one or more of the described RAGE RNAi agents are administered to a mammal in a pharmaceutically acceptable carrier or diluent. In some embodiments, the mammal is a human.

[0258] The route of administration is the path by which a RAGE RNAi agent is brought into contact with the body. In general, methods of administering drugs, oligonucleotides, and nucleic acids, for treatment of a mammal are well known in the art and can be applied to administration of the compositions described herein. The RAGE RNAi agents disclosed herein can be administered via any suitable route in a preparation appropriately tailored to the particular route. Thus, in some embodiments, the herein described pharmaceutical compositions are administered via inhalation, intranasal administration, intratracheal administration, or oropharyngeal aspiration administration. In some embodiments, the pharmaceutical compositions can be administered by injection, for example, intravenously, intramuscularly, intracutaneously, subcutaneously, intraarticularly, intraocularly, or intraperitoneally, or topically.

[0259] The pharmaceutical compositions including a RAGE RNAi agent described herein can be delivered to a cell, group of cells, tissue, or subject using oligonucleotide delivery technologies known in the art. In general, any suitable method recognized in the art for delivering a nucleic acid molecule (in vitro or in vivo) can be adapted for use with the compositions described herein. For example, delivery can be by local administration, (e.g., direct injection, implantation, or topical administering), systemic administration, or subcutaneous, intravenous, intraperitoneal, or parenteral routes, including intracranial (e.g., intraventricular, intraparenchymal and intrathecal), intramuscular, transdermal, airway (aerosol), nasal, oral, rectal, or topical (including buccal and sublingual) administration. In some embodiments, the compositions are administered via inhalation, intranasal administration, oropharyngeal aspiration administration, or intratracheal administration. For example, in some embodiments, it is desired that the RAGE RNAi agents described herein inhibit the expression of an AGER gene in the pulmonary epithelium, for which administration via inhalation (e.g., by an inhaler device, such as a metered-dose inhaler, or a nebulizer such as a jet or vibrating mesh nebulizer, or a soft mist inhaler) is particularly suitable and advantageous

[0260] In some embodiments, the pharmaceutical compositions described herein comprise one or more pharmaceutically acceptable excipients. The pharmaceutical compositions described herein are formulated for administration to a subject.

[0261] As used herein, a pharmaceutical composition or medicament includes a pharmacologically effective amount of at least one of the described therapeutic compounds and one or more pharmaceutically acceptable excipients. Pharmaceutically acceptable excipients (excipients) are substances other than the Active Pharmaceutical Ingredient (API, therapeutic product, e.g., RAGE RNAi agent) that are intentionally included in the drug delivery system. Excipients do not exert or are not intended to exert a therapeutic effect at the intended dosage. Excipients can act to a) aid in processing of the drug delivery system during manufacture, b) protect, support or enhance stability, bioavailability or patient acceptability of the API, c) assist in product identification, and/or d) enhance any other attribute of the overall safety, effectiveness, of delivery of the API during storage or use. A pharmaceutically acceptable excipient may or may not be an inert substance.

[0262] Excipients include, but are not limited to: absorption enhancers, anti-adherents, anti-foaming agents, anti-oxidants, binders, buffering agents, carriers, coating agents, colors, delivery enhancers, delivery polymers, detergents, dextran, dextrose, diluents, disintegrants, emulsifiers, extenders, fillers, flavors, glidants, humectants, lubricants, oils, polymers, preservatives, saline, salts, solvents, sugars, surfactants, suspending agents, sustained release matrices, sweeteners, thickening agents, tonicity agents, vehicles, water-repelling agents, and wetting agents.

[0263] Pharmaceutical compositions suitable for injectable use include sterile aqueous solutions (where water-soluble) or dispersions and sterile powders for the extemporaneous preparation of sterile injectable solutions or dispersion. For intravenous administration, suitable carriers include physiological saline, bacteriostatic water, Cremophor® ELTM (BASF, Parsippany, NJ) or phosphate buffered saline (PBS). It should be stable under the conditions of manufacture and storage and should be preserved against the contaminating action of microorganisms such as bacteria and fungi. The carrier can be a solvent or dispersion medium containing, for example, water, ethanol, polyol (for example, glycerol, propylene glycol, and liquid polyethylene glycol), and suitable mixtures thereof. The proper fluidity can be maintained, for example, by the use of a coating such as lecithin, by the maintenance of the required particle size in the case of dispersion and by the use of surfactants. In many cases, it will be preferable to include isotonic agents, for example, sugars, polyalcohols such as mannitol, sorbitol, and sodium chloride in the composition. Prolonged absorption of the injectable compositions can be brought about by including in the composition an agent which delays absorption, for example, aluminum monostearate and gelatin.

[0264] Sterile injectable solutions can be prepared by incorporating the active compound in the required amount in an appropriate solvent with one or a combination of ingredients enumerated above, as required, followed by filter sterilization. Generally, dispersions are prepared by incorporating the active compound into a sterile vehicle which contains a basic dispersion medium and the required other ingredients from those enumerated above. In the case of sterile powders for the preparation of sterile injectable solutions, methods of preparation include vacuum drying and freeze-drying which yields a powder of the active ingredient plus any additional desired ingredient from a previously sterile-filtered solution thereof.

[0265] Formulations suitable for intra-articular administration can be in the form of a sterile aqueous preparation of the drug that can be in microcrystalline form, for example, in the form of an aqueous microcrystalline suspension. Liposomal formulations or biodegradable polymer systems can also be used to present the drug for both intra-articular and ophthalmic administration.

[0266] Formulations suitable for inhalation administration can be prepared by incorporating the active compound in the desired amount in an appropriate solvent, followed by sterile filtration. In general, formulations for inhalation administration are sterile solutions at physiological pH and have low viscosity (<5 cP). Salts may be added to the formulation to balance tonicity. In some cases, surfactants or co-solvents can be added to increase active compound solubility and improve aerosol characteristics. In some cases, excipients can be added to control viscosity in order to ensure size and distribution of nebulized droplets.

[0267] In some embodiments, pharmaceutical formulations that include the RAGE RNAi agents disclosed herein suitable for inhalation administration can be prepared in water for injection (sterile water), or an aqueous sodium phosphate buffer (for example, the RAGE RNAi agent formulated in 0.5 mM sodium phosphate monobasic, 0.5 mM sodium phosphate dibasic, in water).

[0268] The active compounds can be prepared with carriers that will protect the compound against rapid elimination from the body, such as a controlled release formulation, including implants and microencapsulated delivery systems. Biodegradable, biocompatible polymers can be used, such as ethylene vinyl acetate, polyanhydrides, polyglycolic acid, collagen, polyorthoesters, and polylactic acid. Methods for preparation of such formulations will be apparent to those skilled in the art. Liposomal suspensions can also be used as pharmaceutically acceptable carriers. These can be prepared according to methods known to those skilled in the art, for example, as described in U.S. Pat. No. 4,522,811.

[0269] The RAGE RNAi agents can be formulated in compositions in dosage unit form for ease of administration and uniformity of dosage. Dosage unit form refers to physically discrete units suited as unitary dosages for the subject to be treated; each unit containing a predetermined quantity of active compound calculated to produce the desired therapeutic effect in association with the required pharmaceutical carrier. The specification for the dosage unit forms of the disclosure are dictated by and directly dependent on the unique characteristics of the active compound and the therapeutic effect to be achieved, and the limitations inherent in the art of compounding such an active compound for the treatment of individuals.

[0270] A pharmaceutical composition can contain other additional components commonly found in pharmaceutical compositions. Such additional components include, but are not limited to: anti-pruritics, astringents, local anesthetics, or anti-inflammatory agents (e.g., antihistamine, diphenhydramine, etc.). It is also envisioned that cells, tissues, or isolated organs that express or comprise the herein defined RNAi agents may be used as “pharmaceutical compositions.” As used herein, “pharmacologically effective amount,” “therapeutically effective amount,” or simply “effective amount” refers to that amount of an RNAi agent to produce a pharmacological, therapeutic, or preventive result.

[0271] In some embodiments, the methods disclosed herein further comprise the step of administering a second therapeutic or treatment in addition to administering an RNAi agent disclosed herein. In some embodiments, the second therapeutic is another RAGE RNAi agent (e.g., a RAGE RNAi agent that targets a different sequence within the RAGE target). In other embodiments, the second therapeutic can be a small molecule drug, an antibody, an antibody fragment, and/or an aptamer.

[0272] In some embodiments, described herein are compositions that include a combination or cocktail of at least two RAGE RNAi agents having different sequences. In some embodiments, the two or more RAGE RNAi agents are each separately and independently linked to targeting groups. In some embodiments, the two or more RAGE RNAi agents are each linked to targeting groups that include or consist of integrin targeting ligands. In some embodiments, the two or more RAGE RNAi agents are each linked to targeting groups that include or consist of αvβ6 integrin targeting ligands.

[0273] Described herein are compositions for delivery of RAGE RNAi agents to pulmonary epithelial cells. Furthermore, compositions for delivery of RAGE RNAi agents to cells, including renal epithelial cells and/or epithelial cells in the GI or reproductive tract and/or and ocular surface epithelial cells in the eye, in vivo, are generally described herein.

[0274] Generally, an effective amount of a RAGE RNAi agent disclosed herein will be in the range of from about 0.0001 to about 20 mg/kg of body weight/deposited dose, e.g., from about 0.001 to about 5 mg/kg of body weight/deposited dose. In some embodiments, an effective amount of a RAGE RNAi agent will be in the range of from about 0.01 mg/kg to about 3.0 mg/kg of body weight per deposited dose. In some embodiments, an effective amount of a RAGE RNAi agent will be in the range of from about 0.03 mg/kg to about 2.0 mg/kg of body weight per deposited dose. In some embodiments, an effective amount of a RAGE RNAi agent will be in the range of from about 0.01 to about 1.0 mg/kg of deposited dose per body weight. In some embodiments, an effective amount of a RAGE RNAi agent will be in the range of from about 0.50 to about 1.0 mg/kg of deposited dose per body weight. The amount administered will also likely depend on such variables as the overall health status of the patient, the relative biological efficacy of the compound delivered, the formulation of the drug, the presence and types of excipients in the formulation, and the route of administration. Also, it is to be understood that the initial dosage administered can be increased beyond the above upper level to rapidly achieve the desired blood-level or tissue level, or the initial dosage can be smaller than the optimum. In some embodiments, a dose is administered daily. In some embodiments, a dose is administered weekly. In further embodiments, a dose is administered bi-weekly, tri-weekly, once monthly, or once quarterly (i.e., once every three months).

[0275] For treatment of disease or for formation of a medicament or composition for treatment of a disease, the pharmaceutical compositions described herein including a RAGE RNAi agent can be combined with an excipient or with a second therapeutic agent or treatment including, but not limited to: a second or other RNAi agent, a small molecule drug, an antibody, an antibody fragment, peptide, and/or an aptamer.

[0276] The described RAGE RNAi agents, when added to pharmaceutically acceptable excipients or adjuvants, can be packaged into kits, containers, packs, or dispensers. The pharmaceutical compositions described herein can be packaged in dry powder or aerosol inhalers, other metered-dose inhalers, nebulizers, pre-filled syringes, or vials.

### Methods of Treatment and Inhibition of RAGE Expression

[0277] The RAGE RNAi agents disclosed herein can be used to treat a subject (e.g., a human or other mammal) having a disease or disorder that would benefit from administration of the RNAi agent. In some embodiments, the RNAi agents disclosed herein can be used to treat a subject (e.g., a human) that would benefit from a reduction and/or inhibition in expression of AGER mRNA and/or a reduction in RAGE receptor levels.

[0278] In some embodiments, the RNAi agents disclosed herein can be used to treat a subject (e.g., a human) having a disease or disorder for which the subject would benefit from reduction in RAGE receptors, including but not limited to, pulmonary diseases such as asthma (including severe asthma), acute respiratory distress syndrome, idiopathic pulmonary fibrosis, lung cancer, bronchopulmonary dysplasia, chronic obstructive pulmonary disease (COPD), or cystic fibrosis. In some embodiments the pulmonary diseases is severe asthma. In some embodiments the subject has been previously diagnosed with having cardiovascular disease (atherosclerosis, myocardial infarction, heart failure, peripheral vascular disease), cancer, diabetes, chronic kidney disease, neurodegenerative disease, rheumatoid arthritis, non-alcoholic steatohepatitis, injury caused by certain viral infections including SARS-CoV-2, certain ocular inflammatory conditions, or skeletal muscle wasting. Treatment of a subject can include therapeutic and/or prophylactic treatment. The subject is administered a therapeutically effective amount of any one or more RAGE RNAi agents described herein. The subject can be a human, patient, or human patient. The subject may be an adult, adolescent, child, or infant. Administration of a pharmaceutical composition described herein can be to a human being or animal.

[0279] Increased membrane RAGE activity is known to promote inflammation in tissues. In some embodiments, the described RAGE RNAi agents are used to treat at least one symptom mediated at least in part by a reduction in RAGE levels, in a subject. The subject is administered a therapeutically effective amount of any one or more of the described RAGE RNAi agents. In some embodiments, the subject is administered a prophylactically effective amount of any one or more of the described RNAi agents, thereby treating the subject by preventing or inhibiting the at least one symptom.

[0280] In certain embodiments, the present disclosure provides methods for treatment of diseases, disorders, conditions, or pathological states mediated at least in part by AGER gene expression, in a patient in need thereof, wherein the methods include administering to the patient any of the RAGE RNAi agents described herein.

[0281] In some embodiments, the RAGE RNAi agents are used to treat or manage a clinical presentation or pathological state in a subject, wherein the clinical presentation or pathological state is mediated at least in part by a reduction in RAGE expression. The subject is administered a therapeutically effective amount of one or more of the RAGE RNAi agents or RAGE RNAi agent-containing compositions described herein. In some embodiments, the method comprises administering a composition comprising a RAGE RNAi agent described herein to a subject to be treated.

[0282] In a further aspect, the disclosure features methods of treatment (including prophylactic or preventative treatment) of diseases or symptoms that may be addressed by a reduction in RAGE receptor levels, the methods comprising administering to a subject in need thereof a RAGE RNAi agent that includes an antisense strand comprising the sequence of any of the sequences in Table 2, Table 3, or Table 10. Also described herein are compositions for use in such methods.

[0283] The described RAGE RNAi agents and/or compositions that include RAGE RNAi agents can be used in methods for therapeutic treatment of disease or conditions caused by enhanced or elevated RAGE receptor activity levels. Such methods include administration of a RAGE RNAi agent as described herein to a subject, e.g., a human or animal subject.

[0284] In another aspect, the disclosure provides methods for the treatment (including prophylactic treatment) of a pathological state (such as a condition or disease) mediated at least in part by RAGE expression, wherein the methods include administering to a subject a therapeutically effective amount of an RNAi agent that includes an antisense strand comprising the sequence of any of the sequences in Table 2, Table 3, or Table 10.

[0285] In some embodiments, methods for inhibiting expression of an AGER gene are disclosed herein, wherein the methods include administering to a cell an RNAi agent that includes an antisense strand comprising the sequence of any of the sequences in Table 2, Table 3, or Table 10.

[0286] In some embodiments, methods for the treatment (including prophylactic treatment) of a pathological state mediated at least in part by RAGE expression are disclosed herein, wherein the methods include administering to a subject a therapeutically effective amount of an RNAi agent that includes a sense strand comprising the sequence of any of the sequences in Table 2, Table 4, Table 5, Table 6, or Table 10.

[0287] In some embodiments, methods for inhibiting expression of an AGER gene are disclosed herein, wherein the methods comprise administering to a cell an RNAi agent that includes a sense strand comprising the sequence of any of the sequences in Table 2, Table 4, Table 5, Table 6, or Table 10.

[0288] In some embodiments, methods for the treatment (including prophylactic treatment) of a pathological state mediated at least in part by RAGE expression are disclosed herein, wherein the methods include administering to a subject a therapeutically effective amount of an RNAi agent that includes a sense strand comprising the sequence of any of the sequences in Table 4, Table 5, Table 6, or Table 10, and an antisense strand comprising the sequence of any of the sequences in Table 3 or Table 10.

[0289] In some embodiments, methods for inhibiting expression of an AGER (RAGE) gene are disclosed herein, wherein the methods include administering to a cell an RNAi agent that includes a sense strand comprising the sequence of any of the sequences in Table 4, Table 5, Table 6, or Table 10, and an antisense strand comprising the sequence of any of the sequences in Table 3 or Table 10.

[0290] In some embodiments, methods of inhibiting expression of an AGER gene are disclosed herein, wherein the methods include administering to a subject a RAGE RNAi agent that includes a sense strand consisting of the nucleobase sequence of any of the sequences in Table 4, Table 5, Table 6, or Table 10, and the antisense strand consisting of the nucleobase sequence of any of the sequences in Table 3 or Table 10. In other embodiments, disclosed herein are methods of inhibiting expression of an AGER gene, wherein the methods include administering to a subject a RAGE RNAi agent that includes a sense strand consisting of the modified sequence of any of the modified sequences in Table 4, Table 5, Table 6, or Table 10, and the antisense strand consisting of the modified sequence of any of the modified sequences in Table 3 or Table 10.

[0291] In some embodiments, methods for inhibiting expression of an AGER gene in a cell are disclosed herein, wherein the methods include administering one or more RAGE RNAi agents comprising a duplex structure of one of the duplexes set forth in Tables 7A, 7B, 8, 9A, 9B, and 10.

[0292] In some embodiments, the gene expression level and/or mRNA level of an AGER gene in certain epithelial cells of subject to whom a described RAGE RNAi agent is administered is reduced by at least about 5%, 10%, 15%, 20%, 25%, 30%, 35%, 40%, 45%, 50%, 55%, 60%, 65%, 70%, 75%, 80%, 85%, 90%, 95%, 96%, 97%, 98%, 99%, or greater than 99%, relative to the subject prior to being administered the RAGE RNAi agent or to a subject not receiving the RAGE RNAi agent. In some embodiments, the RAGE receptor or RAGE protein levels in certain epithelial cells of a subject to whom a described RAGE RNAi agent is administered is reduced by at least about 5%, 10%, 15%, 20%, 25%, 30%, 35%, 40%, 45%, 50%, 55%, 60%, 65%, 70%, 75%, 80%, 85%, 90%, 95%, 96%, 97%, 98%, 99%, or greater than 99%, relative to the subject prior to being administered the RAGE RNAi agent or to a subject not receiving the RAGE RNAi agent. The gene expression level, protein level, and/or mRNA level in the subject may be reduced in a cell, group of cells, and/or tissue of the subject. In some embodiments, the AGER mRNA levels in certain epithelial cells subject to whom a described RAGE RNAi agent has been administered is reduced by at least about 30%, 35%, 40%, 45%, 50%, 55%, 60%, 65%, 70%, 75%, 80%, 85%, 90%, 95%, or 98% relative to the subject prior to being administered the RAGE RNAi agent or to a subject not receiving the RAGE RNAi agent.

[0293] A reduction in gene expression, mRNA, and protein levels can be assessed by any methods known in the art. Reduction or decrease in RAGE receptor activity level and/or RAGE protein levels are collectively referred to herein as a decrease in, reduction of, or inhibition of RAGE expression. The Examples set forth herein illustrate known methods for assessing inhibition of RAGE expression and AGER gene expression.

### Cells, Tissues, Organs, and Non-Human Organisms

[0294] Cells, tissues, organs, and non-human organisms that include at least one of the RAGE RNAi agents described herein are contemplated. The cell, tissue, organ, or non-human organism is made by delivering the RNAi agent to the cell, tissue, organ, or non-human organism.

### Additional Illustrative Embodiments

[0295] Provided here are certain additional illustrative embodiments of the disclosed technology. These embodiments are illustrative only and do not limit the scope of the present disclosure or of the claims attached hereto.

[0296] Embodiment 1. An RNAi agent for inhibiting expression of a receptor for advanced glycation end-products gene, comprising:
[0297] an antisense strand comprising at least 15 contiguous nucleotides differing by 0, 1, 2, or 3, nucleotides from any one of the antisense strand sequences disclosed in Table 2 or Table 3; and
[0298] a sense strand comprising a nucleotide sequence that is at least partially complementary to the antisense strand.

[0299] Embodiment 2. An RNAi agent for inhibiting expression of a receptor for advanced glycation end-products gene, comprising:
[0300] a sense strand comprising at least 15 contiguous nucleotides differing by 0, 1, 2, or 3 nucleotides from a stretch of the same length of nucleotides of SEQ ID NO:1; and an antisense strand comprising a nucleotide sequences that is at least partially complementary to the sense strand.

[0301] Embodiment 3. An inhibitor of an AGER (RAGE) gene comprising an antisense strand comprising a nucleotide sequence having at least 15 contiguous nucleotides differing by 0, 1, 2, or 3 nucleotides that are complementary to any of the target nucleotide sequences in Table 1.

[0302] Embodiment 4. An RNAi agent comprising (i) an antisense strand comprising a nucleotide sequence having at least 15 contiguous nucleotides differing by 0, 1, 2, or 3 nucleotides from any of the nucleotide sequences in Table 2, Table 3 or Table 10, and (ii) a sense strand at least partially complementary to the antisense strand.

[0303] Embodiment 5. An RNAi agent comprising (i) an antisense strand comprising, consisting of, or consisting essentially of a nucleotide sequence from any of the antisense strand nucleotide sequences in Table 2, Table 3 or Table 10, and (ii) a sense strand comprising, consisting of, or consisting essentially of a nucleotide sequence from any of the sense strand nucleotide sequences in Table 2, Table 4, Table 5, Table 6, or Table 10.

[0304] Embodiment 6. An RNAi agent comprising an antisense strand and sense strand annealed to form a duplex, wherein the duplex has the structure of any of the duplexes set forth in Table 7A, Table 7B, Table 8, Table 9, or Table 10.

[0305] Embodiment 7. an RNAi agent capable of inhibiting expression of a Receptor for Advanced Glycation End-products gene comprising:
[0306] (i) an antisense strand that is between 18 and 49 nucleotides in length that is at least partially complementary to a Receptor for Advanced Glycation End-products gene (SEQ ID NO:1);
[0307] (ii) a sense strand that is at least partially complementary to the antisense strand;
[0308] and
[0309] (iii) a targeting ligand linked to the sense strand.

[0310] Embodiment 8. An RNAi agent for inhibiting expression of a Receptor for Advanced Glycation End-products gene, comprising:
[0311] an antisense strand comprising at least 17 contiguous nucleotides differing by 0 or 1 nucleotides from any one of the sequences provided in Table 2 or Table 3; and
[0312] a sense strand comprising a nucleotide sequence that is at least partially complementary to the antisense strand.

[0313] Embodiment 9. The RNAi agent of any one of embodiments 1-8, wherein the antisense strand comprises nucleotides 2-18 of any one of the sequences provided in Table 2 or Table 3.

[0314] Embodiment 10. The RNAi agent of any one of embodiments 1-9, wherein the sense strand comprises a nucleotide sequence of at least 17 contiguous nucleotides differing by 0 or 1 nucleotides from any one of the sequences provided in Table 2 or Table 4, and wherein the sense strand has a region of at least 85% complementarity over the 17 contiguous nucleotides to the antisense strand.

[0315] Embodiment 11. The RNAi agent of any one of embodiments 1-10, wherein at least one nucleotide of the RNAi agent is a modified nucleotide or includes a modified internucleoside linkage.

[0316] Embodiment 12. The RNAi agent of any one of embodiments 1-11, wherein all or substantially all of the nucleotides are modified nucleotides.

[0317] Embodiment 13. The RNAi agent of any one of embodiments 11-12, wherein the modified nucleotide is selected from the group consisting of: 2′-O-methyl nucleotide, 2′-fluoro nucleotide, 2′-deoxy nucleotide, 2′,3′-seco nucleotide mimic, locked nucleotide, 2′-F-arabino nucleotide, 2′-methoxyethyl nucleotide, abasic nucleotide, ribitol, inverted nucleotide, inverted 2′-O-methyl nucleotide, inverted 2′-deoxy nucleotide, 2′-amino-modified nucleotide, 2′-alkyl-modified nucleotide, morpholino nucleotide, vinyl phosphonate-containing nucleotide, cyclopropyl phosphonate-containing nucleotide, and 3′-O-methyl nucleotide.

[0318] Embodiment 14. The RNAi agent of embodiment 12, wherein all or substantially all of the nucleotides are modified with 2′-O-methyl nucleotides, 2′-fluoro nucleotides, or combinations thereof.

[0319] Embodiment 15. The RNAi agent of any one of embodiments 1-14, wherein the antisense strand comprises the nucleotide sequence of any one of the modified sequences provided in Table 3.

[0320] Embodiment 16. The RNAi agent of any one of embodiments 1-15, wherein the sense strand comprises the nucleotide sequence of any one of the modified sequences provided in Table 4.

[0321] Embodiment 17. The RNAi agent of embodiment 1, wherein the antisense strand comprises the nucleotide sequence of any one of the modified sequences provided in Table 3 and the sense strand comprises the nucleotide sequence of any one of the modified sequences provided in Table 4.

[0322] Embodiment 18. The RNAi agent of any one of embodiments 1-17, wherein the sense strand is between 18 and 30 nucleotides in length, and the antisense strand is between 18 and 30 nucleotides in length.

[0323] Embodiment 19. The RNAi agent of embodiment 18, wherein the sense strand and the antisense strand are each between 18 and 27 nucleotides in length.

[0324] Embodiment 20. The RNAi agent of embodiment 19, wherein the sense strand and the antisense strand are each between 18 and 24 nucleotides in length.

[0325] Embodiment 21. The RNAi agent of embodiment 20, wherein the sense strand and the antisense strand are each 21 nucleotides in length.

[0326] Embodiment 22. The RNAi agent of embodiment 21, wherein the RNAi agent has two blunt ends.

[0327] Embodiment 23. The RNAi agent of any one of embodiments 1-22, wherein the sense strand comprises one or two terminal caps.

[0328] Embodiment 24. The RNAi agent of any one of embodiments 1-23, wherein the sense strand comprises one or two inverted abasic residues.

[0329] Embodiment 25. The RNAi agent of embodiment 8, wherein the RNAi agent is comprised of a sense strand and an antisense strand that form a duplex having the structure of any one of the duplexes in Table 7A, Table 7B, Table 8, Table 9A, Table 9B, or Table 10.

[0330] Embodiment 26. The RNAi agent of embodiment 25, wherein all or substantially all of the nucleotides are modified nucleotides.

[0331] Embodiment 27. The RNAi agent of embodiment 1, comprising an antisense strand that consists of, consists essentially of, or comprises a nucleotide sequence that differs by 0 or 1 nucleotides from one of the following nucleotide sequences (5′→3′):

(SEQ ID NO: 55)
UUGUGUUCAGUUUCCAUUC;
(SEQ ID NO: 65)
UGAUGUUUUGAGCACCUAC;
(SEQ ID NO: 73)
UUCCAUUCCUGUUCAUUGC;
(SEQ ID NO: 7)
UUGUGUUCAGUUUCCAUUCCG;
(SEQ ID NO: 9)
UGAUGUUUUGAGCACCUACUC;
or
(SEQ ID NO: 8)
UUCCAUUCCUGUUCAUUGCCU.

[0332] Embodiment 28. The RNAi agent of embodiment 27, wherein the sense strand consists of, consists essentially of, or comprises a nucleotide sequence that differs by 0 or 1 nucleotides from one of the following nucleotide sequences (5′→3′):

(SEQ ID NO: 298)
GAAUGGAAACUGAACACAA;
(SEQ ID NO: 308)
GUAGGUGCUCAAAACAUCA;
(SEQ ID NO: 316)
GCAAUGAACAGGAAUIGAA;
(SEQ ID NO: 19)
CGGAAUGGAAACUGAACACAA;
(SEQ ID NO: 20)
GAGUAGGUGCUCAAAACAUCA;
or
(SEQ ID NO: 21)
AGGCAAUGAACAGGAAUIGAA.

[0333] Embodiment 29. The RNAi agent of embodiment 27 or 28, wherein all or substantially all of the nucleotides are modified nucleotides.

[0334] Embodiment 30. The RNAi agent of embodiment 1, comprising an antisense strand that comprises, consists of, or consists essentially of a modified nucleotide sequence that differs by 0 or 1 nucleotides from one of the following nucleotide sequences (5′→3′):

(SEQ ID NO: 2)
usUfsgsUfgUfuCfaGfuUfuCfcAfuUfcCfsg;
(SEQ ID NO: 3)
cPrpusUfsgsUfgUfuCfaGfuUfuCfcAfuUfcCfsg;
(SEQ ID NO: 5)
usGfsasuguuuugaGfcAfcCfuacusc;
(SEQ ID NO: 6)
cPrpusGfsasuguuuugaGfcAfcCfuacusc;
(SEQ ID NO: 4)
usUfscsCfaUfuCfcUfgUfuCfaUfuGfcCfsu;

[0335] wherein a, c, g, and u represent 2′-O-methyl adenosine, 2′-O-methyl cytidine, 2′-O-methyl guanosine, and 2′-O-methyl uridine, respectively; Af, Cf, Gf, and Uf represent 2′-fluoro adenosine, 2′-fluoro cytidine, 2′-fluoro guanosine, and 2′-fluoro uridine, respectively; cPrpu represents a 5′-cyclopropyl phosphonate-2′-O-methyl uridine; s represents a phosphorothioate linkage; and wherein all or substantially all of the nucleotides on the sense strand are modified nucleotides.

[0336] Embodiment 31. The RNAi agent of embodiment 1, wherein the sense strand comprises, consists of, or consists essentially of a modified nucleotide sequence that differs by 0 or 1 nucleotides from one of the following nucleotide sequences (5′→3′):

(SEQ ID NO: 14)
gsaguagGfuGfcUfcaaaacauca;
(SEQ ID NO: 15)
asggcaaugAfAfCfaggaauigaa;
(SEQ ID NO: 13)
csggaauggAfAfAfcugaacacaa;

wherein a, c, g, i, and u represent 2′-O-methyl adenosine, 2′-O-methyl cytidine, 2′-O-methyl guanosine, 2′-O-methyl inosine, and 2′-O-methyl uridine, respectively; Af, Cf, Gf, and Uf represent 2′-fluoro adenosine, 2′-fluoro cytidine, 2′-fluoro guanosine, and 2′-fluoro uridine, respectively; and s represents a phosphorothioate linkage; and wherein all or substantially all of the nucleotides on the antisense strand are modified nucleotides.

[0337] Embodiment 32. The RNAi agent of any one of embodiments 27-31, wherein the sense strand further includes inverted abasic residues at the 3′ terminal end of the nucleotide sequence, at the 5′ end of the nucleotide sequence, or at both.

[0338] Embodiment 33. The RNAi agent of any one of embodiments 1-32, wherein the RNAi agent is linked to a targeting ligand.

[0339] Embodiment 34. The RNAi agent of embodiment 33, wherein the targeting ligand has affinity for a cell receptor expressed on an epithelial cell.

[0340] Embodiment 35. The RNAi agent of embodiment 34, wherein the targeting ligand comprises an integrin targeting ligand.

[0341] Embodiment 36. The RNAi agent of embodiment 35, wherein the integrin targeting ligand is an αvβ6 integrin targeting ligand.

[0342] Embodiment 37. The RNAi agent of embodiment 36, wherein the targeting ligand comprises the structure:

[chemical structure]

[0343] or a pharmaceutically acceptable salt thereof, or

[chemical structure]

or a pharmaceutically acceptable salt thereof, wherein [symbol] indicates the point of connection to the RNAi agent.

[0344] Embodiment 38. The RNAi agent of any one of embodiments 33-36, wherein the targeting ligand has a structure selected from the group consisting of:

[chemical structure]

[chemical structure]

[chemical structure]

[chemical structure]

[chemical structure]

[chemical structure]

[chemical structure]

[chemical structure]

[chemical structure]

wherein [symbol] indicates the point of connection to the RNAi agent.

[0345] Embodiment 39. The RNAi agent of embodiment 38, wherein RNAi agent is conjugated to a targeting ligand having the following structure:

[chemical structure]

[0346] Embodiment 40. The RNAi agent of any one of embodiments 33-36, wherein the targeting ligand has the following structure:

[chemical structure]

[0347] Embodiment 41. The RNAi agent of any one of embodiments 33-36, wherein the targeting ligand is conjugated to the sense strand.

[0348] Embodiment 42. The RNAi agent of embodiment 41, wherein the targeting ligand is conjugated to the 5′ terminal end of the sense strand.

[0349] Embodiment 43. The RNAi agent of any of the preceding embodiments, wherein the RNAi agent is conjugated to a targeting ligand and has the duplex structure of AC000292, AC001266, AC001267, or AC001268.

[0350] Embodiment 44. A composition comprising the RNAi agent of any one of embodiments 1-43, wherein the composition further comprises a pharmaceutically acceptable excipient.

[0351] Embodiment 45. The composition of embodiment 44, further comprising a second RNAi agent capable of inhibiting the expression of Receptor for Advanced Glycation End-products gene expression.

[0352] Embodiment 46. The composition of any one of embodiments 44-45, further comprising one or more additional therapeutics.

[0353] Embodiment 47. The composition of any one of embodiments 44-46, wherein the composition is formulated for administration by inhalation.

[0354] Embodiment 48. The composition of embodiment 47, wherein the composition is delivered by a metered-dose inhaler, jet nebulizer, vibrating mesh nebulizer, or soft mist inhaler.

[0355] Embodiment 49. The composition of any of embodiments 44-48, wherein the RNAi agent is a sodium salt.

[0356] Embodiment 50. The composition of any of embodiments 44-49, wherein the pharmaceutically acceptable excipient is water for injection.

[0357] Embodiment 51. The composition of any of embodiments 44-49, wherein the pharmaceutically acceptable excipient is a buffered saline solution.

[0358] Embodiment 52. A method for inhibiting expression of a Receptor for Advanced Glycation End-products gene in a cell, the method comprising introducing into a cell an effective amount of an RNAi agent of any one of embodiments 1-43 or the composition of any one of embodiments 44-51.

[0359] Embodiment 53. The method of embodiment 52, wherein the cell is within a subject.

[0360] Embodiment 54. The method of embodiment 53, wherein the subject is a human subject.

[0361] Embodiment 55. The method of any one of embodiments 52-54, wherein following the administration of the RNAi agent the Receptor for Advanced Glycation End-products gene expression is inhibited by at least about 30%.

[0362] Embodiment 56. A method of treating one or more symptoms or diseases associated with enhanced or elevated membrane RAGE activity levels, the method comprising administering to a human subject in need thereof a therapeutically effective amount of the composition of any one of embodiments 44-51.

[0363] Embodiment 57. The method of embodiment 56, wherein the disease is a respiratory disease.

[0364] Embodiment 58. The method of embodiment 57, wherein the respiratory disease is cystic fibrosis, pneumonia, chronic bronchitis, non-cystic fibrosis bronchiectasis, chronic obstructive pulmonary disease (COPD), asthma, respiratory tract infections, primary ciliary dyskinesia, or lung carcinoma cystic fibrosis.

[0365] Embodiment 59. The method of embodiment 58, wherein the disease is chronic obstructive pulmonary disease (COPD).

[0366] Embodiment 60. The method of embodiment 56, wherein the disease is an ocular disease.

[0367] Embodiment 61. The method of embodiment 60, wherein the ocular disease is dry eye syndrome.

[0368] Embodiment 62. The method of any one of embodiments 52-61, wherein the RNAi agent is administered at a deposited dose of about 0.01 mg/kg to about 5.0 mg/kg of body weight of the subject.

[0369] Embodiment 63. The method of any one of embodiments 52-61, wherein the RNAi agent is administered at a deposited dose of about 0.03 mg/kg to about 2.0 mg/kg of body weight of the subject.

[0370] Embodiment 64. The method of any of embodiments 52-61, wherein the RNAi agent is administered in two or more doses.

[0371] Embodiment 65. Use of the RNAi agent of any one of embodiments 1-43, for the treatment of a disease, disorder, or symptom that is mediated at least in part by membrane RAGE activity and/or AGER gene expression.

[0372] Embodiment 66. Use of the composition according to any one of embodiments 44-51, for the treatment of a disease, disorder, or symptom that is mediated at least in part by Receptor for Advanced Glycation End-products receptor activity and/or Receptor for Advanced Glycation End-products gene expression.

[0373] Embodiment 67. Use of the composition according to any one of embodiments 44-51, for the manufacture of a medicament for treatment of a disease, disorder, or symptom that is mediated at least in part by Receptor for Advanced Glycation End-products receptor activity and/or Receptor for Advanced Glycation End-products gene expression.

[0374] Embodiment 68. The use of any one of embodiments 65-67, wherein the disease is pulmonary inflammation.

[0375] Embodiment 69. A method of making an RNAi agent of any one of embodiments 1-43, comprising annealing a sense strand and an antisense strand to form a double-stranded ribonucleic acid molecule.

[0376] Embodiment 70. The method of embodiment 69, wherein the sense strand comprises a targeting ligand.

[0377] Embodiment 71. The method of embodiment 70, comprising conjugating a targeting ligand to the sense strand.

[0378] The above provided embodiments and items are now illustrated with the following, non-limiting examples.

### EXAMPLES

### Example 1. Synthesis of RAGE RNAi Agents

[0379] RAGE RNAi agent duplexes disclosed herein were synthesized in accordance with the following:

[0380] A. Synthesis. The sense and antisense strands of the RAGE RNAi agents were synthesized according to phosphoramidite technology on solid phase used in oligonucleotide synthesis. Depending on the scale, a MerMade96ER (Bioautomation), a MerMade12® (Bioautomation), or an OP Pilot 100 (GE Healthcare) was used. Syntheses were performed on a solid support made of controlled pore glass (CPG, 500 Å or 600 Å, obtained from Prime Synthesis, Aston, PA, USA). The monomer positioned at the 3′ end of the respective strand was attached to the solid support as a starting point for synthesis. All RNA and 2′-modified RNA phosphoramidites were purchased from Thermo Fisher Scientific (Milwaukee, WI, USA). Specifically, the 2′-O-methyl phosphoramidites that were used included the following: (5′-O-dimethoxytrityl-N⁶-(benzoyl)-2′-O-methyl-adenosine-3′-O-(2-cyanoethyl-N,N-diisopropylamino)phosphoramidite, 5′-O-dimethoxy-trityl-N⁴-(acetyl)-2′-O-methyl-cytidine-3′-O-(2-cyanoethyl-N,N-diisopropyl-amino)phosphoramidite, (5′-O-dimethoxytrityl-N²-(isobutyryl)-2′-O-methyl-guanosine-3′-O-(2-cyanoethyl-N,N-diisopropylamino) phosphoramidite, and 5′-O-dimethoxytrityl-2′-O-methyl-uridine-3′-O-(2-cyanoethyl-N,N-diisopropylamino)phosphoramidite. The 2′-deoxy-2′-fluoro-phosphoramidites carried the same protecting groups as the 2′-O-methyl RNA amidites. 5′-dimethoxytrityl-2′-O-methyl-inosine-3′-O-(2-cyanoethyl-N,N-diisopropylamino)phosphoramidites were purchased from Glen Research (Virginia). The inverted abasic (3′-O-dimethoxytrityl-2′-deoxyribose-5′-O-(2-cyanoethyl-N,N-diisopropylamino)phosphoramidites were purchased from ChemGenes (Wilmington, MA, USA). The following UNA phosphoramidites were used: 5′-(4,4′-Dimethoxytrityl)-N6-(benzoyl)-2′,3′-seco-adenosine, 2′-benzoyl-3′-[(2-cyanoethyl)-(N,N-diisopropyl)]-phosphoramidite, 5′-(4,4′-Dimethoxytrityl)-N-acetyl-2′,3′-seco-cytosine, 2′-benzoyl-3′-[(2-cyanoethyl)-(N,N-diiso-propyl)]-phosphoramidite, 5′-(4,4′-Dimethoxytrityl)-N-isobutyryl-2′,3′-seco-guanosine, 2′-benzoyl-3′-[(2-cyanoethyl)-(N,N-diisopropyl)]-phosphoramidite, and 5′-(4,4′-Dimethoxy-trityl)-2′,3′-seco-uridine, 2′-benzoyl-3′-[(2-cyanoethyl)-(N,N-diiso-propyl)]-phosphoramidite. TFA aminolink phosphoramidites were also commercially purchased (ThermoFisher). Linker L6 was purchased as propargyl-PEG5-NHS from BroadPharm (catalog #BP-20907) and coupled to the NH₂-C₆ group from an aminolink phosphoramidite to form -L6-C6-, using standard coupling conditions. The linker Alk-cyHex was similarly commercially purchased from Lumiprobe (alkyne phosphoramidite, 5′-terminal) as a propargyl-containing compound phosphoramidite compound to form the linker -Alk-cyHex-. In each case, phosphorothioate linkages were introduced as specified using the conditions set forth herein. The cyclopropyl phosphonate phosphoramidites were synthesized in accordance with International Patent Application Publication No. WO 2017/214112.

[0381] Tri-alkyne-containing phosphoramidites were dissolved in anhydrous dichloromethane or anhydrous acetonitrile (50 mM), while all other amidites were dissolved in anhydrous acetonitrile (50 mM) and molecular sieves (3 Å) were added. 5-Benzylthio-1H-tetrazole (BTT, 250 mM in acetonitrile) or 5-Ethylthio-1H-tetrazole (ETT, 250 mM in acetonitrile) was used as activator solution. Coupling times were 10 minutes (RNA), 90 seconds (2′ O-Me), and 60 seconds (2′ F). In order to introduce phosphorothioate linkages, a 100 mM solution of 3-phenyl 1,2,4-dithiazoline-5-one (POS, obtained from PolyOrg, Inc., Leominster, MA, USA) in anhydrous acetonitrile was employed.

[0382] Alternatively, tri-alkyne moieties were introduced post-synthetically (see section E, below). For this route, the sense strand was functionalized with a 5′ and/or 3′ terminal nucleotide containing a primary amine. TFA aminolink phosphoramidite was dissolved in anhydrous acetonitrile (50 mM) and molecular sieves (3 Å) were added. 5-Benzylthio-1H-tetrazole (BTT, 250 mM in acetonitrile) or 5-Ethylthio-1H-tetrazole (ETT, 250 mM in acetonitrile) was used as activator solution. Coupling times were 10 minutes (RNA), 90 seconds (2′ O-Me), and 60 seconds (2′ F). In order to introduce phosphorothioate linkages, a 100 mM solution of 3-phenyl 1,2,4-dithiazoline-5-one (POS, obtained from PolyOrg, Inc., Leominster, MA, USA) in anhydrous acetonitrile was employed.

[0383] B. Cleavage and deprotection of support bound oligomer. After finalization of the solid phase synthesis, the dried solid support was treated with a 1:1 volume solution of 40 wt. % methylamine in water and 28% to 31% ammonium hydroxide solution (Aldrich) for 1.5 hours at 30° C. The solution was evaporated and the solid residue was reconstituted in water (see below).

[0384] C. Purification. Crude oligomers were purified by anionic exchange HPLC using a TSKgel SuperQ-5 PW 13 μm column and Shimadzu LC-8 system. Buffer A was 20 mM Tris, 5 mM EDTA, pH 9.0 and contained 20% Acetonitrile and buffer B was the same as buffer A with the addition of 1.5 M sodium chloride. UV traces at 260 nm were recorded. Appropriate fractions were pooled then run on size exclusion HPLC using a GE Healthcare XK 16/40 column packed with Sephadex G-25 fine with a running buffer of 100 mM ammonium bicarbonate, pH 6.7 and 20% Acetonitrile or filtered water. Alternatively, pooled fractions were desalted and exchanged into an appropriate buffer or solvent system via tangential flow filtration.

[0385] D. Annealing. Complementary strands were mixed by combining equimolar RNA solutions (sense and antisense) in 1×PBS (Phosphate-Buffered Saline, 1×, Corning, Cellgro) to form the RNAi agents. Some RNAi agents were lyophilized and stored at −15 to −25° C. Duplex concentration was determined by measuring the solution absorbance on a UV-Vis spectrometer in 1×PBS. The solution absorbance at 260 nm was then multiplied by a conversion factor (0.050 mg/(mL·cm)) and the dilution factor to determine the duplex concentration.

[0386] E. Conjugation of Tri-alkyne linker. In some embodiments a tri-alkyne linker is conjugated to the sense strand of the RNAi agent on resin as a phosphoramidite (see Example 1G for the synthesis of an example tri-alkyne linker phosphoramidite and Example 1A for the conjugation of the phosphoramidite.). In other embodiments, a tri-alkyne linker may be conjugated to the sense strand following cleavage from the resin, described as follows: either prior to or after annealing, in some embodiments, the 5′ or 3′ amine functionalized sense strand is conjugated to a tri-alkyne linker. An example tri-alkyne linker structure that can be used in forming the constructs disclosed herein is as follows:

[chemical structure]

To conjugate the tri-alkyne linker to the annealed duplex, amine-functionalized duplex was dissolved in 90% DMSO/10% H₂O, at ~50-70 mg/mL. 40 equivalents triethylamine was added, followed by 3 equivalents tri-alkyne-PNP. Once complete, the conjugate was precipitated twice in a solvent system of 1× phosphate buffered saline/acetonitrile (1:14 ratio), and dried.

[0387] F. Synthesis of Targeting Ligand SM6.1

### ((S)-3-(4-(4-((14-azido-3,6,9,12-tetraoxatetradecyl)oxy)naphthalen-1-yl)phenyl)-3-(2-(4-((4-methylpyridin-2-yl)amino)butanamido)acetamido)propanoic acid)

[chemical structure]

[0388] Compound 5 (tert-Butyl (4-methylpyridin-2-yl) carbamate) (0.501 g, 2.406 mmol, 1 equiv.) was dissolved in DMF (17 mL). To the mixture was added NaH (0.116 mg, 3.01 mmol, 1.25 eq, 60% dispersion in oil) The mixture stirred for 10 min before adding Compound 20 (Ethyl 4-Bromobutyrate (0.745 g, 3.82 mmol, 0.547 mL)) (Sigma 167118). After 3 hours the reaction was quenched with ethanol (18 mL) and concentrated. The concentrate was dissolved in DCM (50 mL) and washed with saturated aq. NaCl solution (1×50 mL), dried over Na₂SO₄, filtered and concentrated. The product was purified on silica column, gradient 0-5% Methanol in DCM.

[chemical structure]

[0389] Compound 21 was dissolved (0.80 g, 2.378 mmol) in 100 mL of Acetone: 0.1 M NaOH [1:1]. The reaction was monitored by TLC (5% ethyl acetate in hexane). The organics were concentrated away, and the residue was acidified to pH 3-4 with 0.3 M Citric Acid (40 mL). The product was extracted with DCM (3×75 mL). The organics were pooled, dried over Na₂SO₄, filtered and concentrated. The product was used without further purification.

[chemical structure]

[0390] To a solution of Compound 22 (1.1 g, 3.95 mmol, 1 equiv.), Compound 45 (595 mg, 4.74 mmol, 1.2 equiv.), and TBTU (1.52 g, 4.74 mmol, 1.2 equiv.) in anhydrous DMF (10 mL) was added diisopropylethylamine (2.06 mL, 11.85 mmol, 3 equiv.) at 0° C. The reaction mixture was warmed to room temperature and stirred 3 hours. The reaction was quenched by saturated NaHCO₃ solution (10 mL). The aqueous phase was extracted with ethyl acetate (3×10 mL) and the organic phase was combined, dried over anhydrous Na₂SO₄, and concentrated. The product was separated by CombiFlash® using silica gel as the stationary phase. LC-MS: calculated [M+H]+366.20, found 367.

[chemical structure]

[0391] To a solution of compound 61 (2 g, 8.96 mmol, 1 equiv.), and compound 62 (2.13 mL, 17.93 mmol, 2 equiv.) in anhydrous DMF (10 mL) was added K₂CO₃ (2.48 g, 17.93 mmol, 2 equiv.) at 0° C. The reaction mixture was warmed to room temperature and stirred overnight. The reaction was quenched by water (10 mL). The aqueous phase was extracted with ethyl acetate (3×10 mL) and the organic phase was combined, dried over anhydrous Na₂SO₄, and concentrated. The product was separated by CombiFlash® using silica gel as the stationary phase.

[chemical structure]

[0392] To a solution of compound 60 (1.77 g, 4.84 mmol, 1 equiv.) in THF (5 mL) and H₂O (5 mL) was added lithium hydroxide monohydrate (0.61 g, 14.53 mmol, 3 equiv.) portion-wise at 0° C. The reaction mixture was warmed to room temperature. After stirring at room temperature for 3 hours, the reaction mixture was acidified by HCl (6 N) to pH 3.0. The aqueous phase was extracted with ethyl acetate (3×20 mL) and the organic layer was combined, dried over Na₂SO₄, and concentrated. LC-MS: calculated [M+H]+352.18, found 352.

[chemical structure]

[0393] To a solution of compound 63 (1.88 g, 6.0 mmol, 1.0 equiv.) in anhydrous THF (20 mL) was added n-BuLi in hexane (3.6 mL, 9.0 mmol, 1.5 equiv.) drop-wise at −78° C. The reaction was kept at −78° C. for another 1 hour. Triisopropylborate (2.08 mL, 9.0 mmol, 1.5 equiv.) was then added into the mixture at −78° C. The reaction was then warmed up to room temperature and stirred for another 1 hour. The reaction was quenched by saturated NH₄Cl solution (20 mL) and the pH was adjusted to 3. The aqueous phase was extracted with EtOAc (3×20 mL) and the organic phase was combined, dried over Na₂SO₄, and concentrated.

[chemical structure]

[0394] Compound 12 (300 mg, 0.837 mmol, 1.0 equiv.), Compound 65 (349 mg, 1.256 mmol, 1.5 equiv.), XPhos Pd G2 (13 mg, 0.0167 mmol, 0.02 equiv.), and K₃PO₄ (355 mg, 1.675 mmol, 2.0 equiv.) were mixed in a round-bottom flask. The flask was sealed with a screw-cap septum, and then evacuated and backfilled with nitrogen (this process was repeated a total of 3 times). Then, THF (8 mL) and water (2 mL) were added via syringe. The mixture was bubbled with nitrogen for 20 min and the reaction was kept at room temperature for overnight. The reaction was quenched with water (10 mL), and the aqueous phase was extracted with ethyl acetate (3×10 mL). The organic phase was dried over Na₂SO₄, concentrated, and purified via CombiFlash® using silica gel as the stationary phase and was eluted with 15% EtOAc in hexane. LC-MS: calculated [M+H]+512.24, found 512.56.

[chemical structure]

[0395] Compound 66 (858 mg, 1.677 mmol, 1.0 equiv.) was cooled by ice bath. HCl in dioxane (8.4 mL, 33.54 mmol, 20 equiv.) was added into the flask. The reaction was warmed to room temperature and stirred for another 1 hr. The solvent was removed by rotary evaporator and the product was directly used without further purification. LC-MS: calculated [M+H]+412.18, found 412.46.

[chemical structure]

[0396] To a solution of compound 64 (500 mg, 1.423 mmol, 1 equiv.), compound 67 (669 mg, 1.494 mmol, 1.05 equiv.), and TBTU (548 mg, 0.492 mmol, 1.2 equiv.) in anhydrous DMF (15 mL) was added diisopropylethylamine (0.744 mL, 4.268 mmol, 3 equiv.) at 0° C. The reaction mixture was warmed to room temperature and stirred for another 1 hr. The reaction was quenched by saturated NaHCO₃ aqueous solution (10 mL) and the product was extracted with ethyl acetate (3×20 mL). The organic phase was combined, dried over Na₂SO₄, and concentrated. The product was purified by CombiFlash® using silica gel as the stationary phase and was eluted with 3-4% methanol in DCM. The yield was 96.23%. LC-MS: calculated [M+H]+745.35, found 746.08.

[chemical structure]

[0397] To a solution of compound 68 (1.02 g, 1.369 mmol, 1 equiv.) in ethyl acetate (10 mL) was added 10% Pd/C (0.15 g, 50% H₂O) at room temperature. The reaction mixture was warmed to room temperature and the reaction was monitored by LC-MS. The reaction was kept at room temperature overnight. The solids were filtered through Celite® and the solvent was removed by rotary evaporator. The product was directly used without further purification. LC-MS: [M+H]+655.31, found 655.87.

[chemical structure]

[0398] To a solution of compound 69 (100 mg, 0.152 mmol, 1 equiv.) and azido-PEG₅-OTs (128 mg, 0.305 mmol, 2 equiv.) in anhydrous DMF (2 mL) was added K₂CO₃ (42 mg, 0.305 mmol, 2 equiv.) at 0° C. The reaction mixture was stirred for 6 hours at 80° C. The reaction was quenched by saturated NaHCO₃ solution and the aqueous layer was extracted with ethyl acetate (3×10 mL). The organic phase was combined, dried over Na₂SO₄, and concentrated. LC-MS: calculated [M+H]+900.40, found 901.46.

[chemical structure]

[0399] To a solution of compound 72 (59 mg, 0.0656 mmol, 1.0 equiv.) in THF (2 mL) and water (2 mL) was added lithium hydroxide (5 mg, 0.197 mmol, 3.0 equiv.) at room temperature. The mixture was stirred at room temperature for another 1 hr. The pH was adjusted to 3.0 by HCl (6N) and the aqueous phase was extracted with EtOAc (3×10 mL). The organic phase was combined, dried over Na₂SO₄, and concentrated. TFA (0.5 mL) and DCM (0.5 mL) was added into the residue and the mixture was stirred at room temperature for another 3 hr. The solvent was removed by rotary evaporator. LC-MS: calculated [M+H]+786.37, found 786.95.

[0400] G. Synthesis of TriAlk 14

[0401] TriAlk14 and (TriAlk14) s as shown in Table 11, above, may be synthesized using the synthetic route shown below. Compound 14 may be added to the sense strand as a phosphoramidite using standard oligonucleotide synthesis techniques, or compound 22 may be conjugated to the sense strand comprising an amine in an amide coupling reaction.

[chemical structure]

[0402] To a 3-L jacketed reactor was added 500 mL DCM and 4 (75.0 g, 0.16 mol). The internal temperature of the reaction was cooled to 0° C. and TBTU (170.0 g, 0.53 mol) was added. The suspension was then treated with the amine 5 (75.5 g, 0.53 mol) dropwise keeping the internal temperature less than 5° C. The reaction was then treated with DIPEA (72.3 g, 0.56 mol) slowly, keeping the internal temperature less than 5° C. After the addition was complete, the reaction was warmed up to 23° C. over 1 hour, and allowed to stir for 3 hours. A 10% kicker charge of all three reagents were added and allowed to stir an additional 3 hours. The reaction was deemed complete when <1% of 4 remained. The reaction mixture was washed with saturated ammonium chloride solution (2×500 mL) and once with saturated sodium bicarbonate solution (500 mL). The organic layer was then dried over sodium sulfate and concentrated to an oil. The mass of the crude oil was 188 g which contained 72% 6 by QNMR. The crude oil was carried to the next step. Calculated mass for C₄₆H₆₀N₄O₁₁=845.0 m/z. Found [M+H]=846.0.

[chemical structure]

[0403] The 121.2 g of crude oil containing 72 wt % compound 6 (86.0 g, 0.10 mol) was dissolved in DMF (344 mL) and treated with TEA (86 mL, 20 v/v %), keeping the internal temperature below 23° C. The formation of dibenzofulvene (DBF) relative to the consumption of Fmoc-amine 6 was monitored via HPLC method 1 (FIG. 2) and the reaction was complete within 10 hours. To the solution was added glutaric anhydride (12.8 g, 0.11 mol) and the intermediate amine 7 was converted to compound 8 within 2 hours. Upon completion, the DMF and TEA were removed at 30° C. under reduced pressure resulting in 100 g of a crude oil. Due to the high solubility of compound 7 in water, an aqueous workup could not be used, and chromatography is the only way to remove DBF, TMU, and glutaric anhydride. The crude oil (75 g) was purified on a Teledyne ISCO Combi-Flash® purification system in three portions. The crude oil (25 g) was loaded onto a 330 g silica column and eluted from 0-20% methanol/DCM over 30 minutes resulting in 42 g of compound 8 (54% yield over 3 steps). Calculated mass for C₃₆H₅₅N₄O₁₂=736.4 m/z. Found [M+H]=737.0.

[chemical structure]

[0404] Compound 8 (42.0 g, 0.057 mol) was co-stripped with 10 volumes of acetonitrile prior to use to remove any residual methanol from chromatography solvents. The oil was redissolved in DMF (210 mL) and cooled to 0° C. The solution was treated with 4-nitrophenol (8.7 g, 0.063 moL) followed by EDC-hydrochloride (12.0 g, 0.063 mol) and found to reach completion within 10 hours. The solution was cooled to 0° C. and 10 volumes ethyl acetate was added followed by 10 volumes saturated ammonium chloride solution, keeping the internal temperature below 15° C. The layers were allowed to separate and the ethyl acetate layer was washed with brine. The combined aqueous layers were extracted twice with 5 volumes ethyl acetate. The combined organic layers were dried over sodium sulfate and concentrated to an oil. The crude oil (55 g) was purified on a Teledyne ISCO Combi-Flash® purification system in three portions. The crude oil (25 g) was loaded onto a 330 g silica column and eluted from 0-10% methanol/DCM over 30 minutes resulting in 22 g of pure 9 (Compound 22) (50% yield). Calculated mass for C₄₂H₅₉N₅O₁₄=857.4 m/z. Found [M+H]=858.0.

[chemical structure]

[0405] A solution of ester 9 (49.0 g, 57.1 mmol) and 6-amino-1-hexanol (7.36 g, 6.28 mmol) in dichloromethane (3 volumes) was treated with triethylamine (11.56 g, 111.4 mmol) dropwise. The reaction was monitored by observing the disappearance of compound 9 on HPLC Method 1 and was found to be complete in 10 minutes. The crude reaction mixture was diluted with 5 volumes dichloromethane and washed with saturated ammonium chloride (5 volumes) and brine (5 volumes). The organic layer was dried over sodium sulfate and concentrated to an oil. The crude oil was purified on a Teledyne ISCO Combi-Flash® purification system using a 330 g silica column. The 4-nitrophenol was eluted with 100% ethyl acetate and 10 was flushed from the column using 20% methanol/DCM resulting in a colorless oil (39 g, 81% yield). Calculated mass for C₄₂H₆₉N₅O₁₂=836.0 m/z. Found [M+H]=837.0.

[chemical structure]

[0406] Alcohol 10 was co-stripped twice with 10 volumes of acetonitrile to remove any residual methanol from chromatography solvents and once more with dry dichloromethane (KF<60 ppm) to remove trace water. The alcohol 10 (2.30 g, 2.8 mmol) was dissolved in 5 volumes dry dichloromethane (KF<50 ppm) and treated with diisopropylammonium tetrazolide (188 mg, 1.1 mmol). The solution was cooled to 0° C. and treated with 2-cyanoethyl N,N,N′,N′-tetraisopropylphosphoramidite (1.00 g, 3.3 mmol) dropwise. The solution was removed from ice-bath and stirred at 20° C. The reaction was found to be complete within 3-6 hours. The reaction mixture was cooled to 0° C. and treated with 10 volumes of a 1:1 solution of saturated ammonium bicarbonate/brine and then warmed to ambient over 1 minute and allowed to stir an additional 3 minutes at 20° C. The biphasic mixture was transferred to a separatory funnel and 10 volumes of dichloromethane was added. The organic layer was separated and washed with 10 volumes of saturated sodium bicarbonate solution to hydrolyze unreacted bis-phosphorous reagent. The organic layer was dried over sodium sulfate and concentrated to an oil resulting in 3.08 g of 94 wt % Compound 14. Calculated mass for C₅₁H₈₆N₇O₁₃P=1035.6 m/z. Found [M+H]=1036.

[0407] H. Conjugation of Targeting Ligands. Either prior to or after annealing, the 5′ or 3′ tridentate alkyne functionalized sense strand is conjugated to targeting ligands. The following example describes the conjugation of targeting ligands to the annealed duplex: Stock solutions of 0.5M Tris(3-hydroxypropyltriazolylmethyl)amine (THPTA), 0.5M of Cu(II) sulfate pentahydrate (Cu(II)SO₄·5H₂O) and 2M solution of sodium ascorbate were prepared in deionized water. A 75 mg/mL solution in DMSO of targeting ligand was made. In a 1.5 mL centrifuge tube containing tri-alkyne functionalized duplex (3 mg, 75 μL, 40 mg/mL in deionized water, ~15,000 g/mol), 25 μL of 1M Hepes pH 8.5 buffer is added. After vortexing, 35 μL of DMSO was added and the solution is vortexed. Targeting ligand was added to the reaction (6 equivalents/duplex, 2 equivalents/alkyne, ~15 μL) and the solution is vortexed. Using pH paper, pH was checked and confirmed to be PH ~8. In a separate 1.5 mL centrifuge tube, 50 μL of 0.5M THPTA was mixed with 10 μL of 0.5M Cu(II)SO₄·5H₂O, vortexed, and incubated at room temp for 5 min. After 5 min, THPTA/Cu solution (7.2 μL, 6 equivalents 5:1 THPTA:Cu) was added to the reaction vial, and vortexed. Immediately afterwards, 2M ascorbate (5 μL, 50 equivalents per duplex, 16.7 per alkyne) was added to the reaction vial and vortexed. Once the reaction was complete (typically complete in 0.5-1 h), the reaction was immediately purified by non-denaturing anion exchange chromatography.

### Example 2. In Vivo Intratracheal Administration of RAGE RNAi Agents in Rats

[0408] On study day 1, male Sprague Dawley rats were administered 200 microliters via a microsprayer device (Penn Century, Philadelphia, PA) suitable for intratracheal (IT) administration of isotonic saline or 1.0 mg/kg of one of the following RAGE RNAi agents:

TABLE 12
RAGE RNAi Agent and Dosing for Example 2

| Group ID | AC Duplex Number |
|---|---|
| Group 1 (isotonic saline) | N/A |
| Group 2 (1.0 mg/kg Tri-SM6.1-αvβ6-AD06949) | AC000614 |
| Group 3 (1.0 mg/kg Tri-SM6.1-αvβ6-AD07256) | AC000186 |
| Group 4 (1.0 mg/kg Tri-SM6.1-αvβ6-AD07474) | AC000286 |
| Group 5 (1.0 mg/kg Tri-SM6.1-αvβ6-AD07475) | AC000292 |
| Group 6 (1.0 mg/kg Tri-SM6.1-αvβ6-AD07476) | AC000818 |
| Group 7 (1.0 mg/kg Tri-SM6.1-αvβ6-AD07477) | AC000819 |

[0409] As noted in Table 12, each of the RAGE RNAi agents were conjugated to a tridentate small molecule αvβ6 epithelial cell targeting ligand (Tri-SM6.1, see FIG. 1) at the 5′ terminal end of the sense strand, formulated in isotonic saline.

[0410] The chemically modified sequences for RAGE RNAi agents AD07474, AD07475, AD07476, and AD07477 are shown in Table 7B (showing duplex), Table 3 (showing respective antisense strand), and Table 5 (showing respective sense strand with linker but without tridentate small molecule αvβ6 epithelial cell targeting ligand (Tri-SM6.1).

[0411] AD06949 and AD07256 are rat and mouse-specific sequences that do not have homology with the human AGER gene, and were chemically modified as follows:

Tri-SM6.1-avβ6-AD06949
Modified Sense Strand (5’→3′):
(SEQ ID NO: 888)
Tri-SM6.1-avβ6-(TA14)cscacaugaUfCfCfaugcuiaguas(invAb)
Modified Antisense Strand (5’→3′):
(SEQ ID NO: 889)
usAfscsUfcAfgCfaUfgGfaUfcAfuGfuGfsg
Tri-SM6.1-avβ6-AD07256
Modified Sense Strand (5’→3′):
(SEQ ID NO: 890)
Tri-SM6.1-avβ6-(TA14)cscacaugaUfCfCfaugcuiaguas(invAb)
Modified Antisense Strand (5’→3′):
(SEQ ID NO: 891)
cPrpusAfscsUfcAfgCfaUfgGfaUfcAfuGfuGfsg

[0412] Five (5) rats were dosed per group. Rats were sacrificed on study day 8, and total RNA was isolated from both lungs following collection and homogenization. Rat AGER mRNA expression was quantitated by probe-based quantitative PCR, normalized to rat GAPDH expression, and expressed as fraction of vehicle control group (geometric mean, +/−95% confidence interval).

TABLE 13
Average Relative Rat RAGE mRNA
Expression at Sacrifice (Day 8) in Example 2

| | Average Relative | | |
|---|---|---|---|
| | rAGER mRNA | | |
| | Expression | Low | High |
| Group ID | (n = 5) | (error) | (error) |
| Group 1 (isotonic saline) | 1.000 | 0.060 | 0.065 |
| Group 2 (1.0 mg/kg | 0.306 | 0.019 | 0.017 |
| Tri-SM6.1-αvβ6-AD06949) | | | |
| Group 3 (1.0 mg/kg | 0.142 | 0.019 | 0.010 |
| Tri-SM6.1-αvβ6-AD07256) | | | |
| Group 4 (1.0 mg/kg | 0.195 | 0.031 | 0.067 |
| Tri-SM6.1-αvβ6-AD07474) | | | |
| Group 5 (1.0 mg/kg | 0.125 | 0.037 | 0.038 |
| Tri-SM6.1-αvβ6-AD07475) | | | |
| Group 6 (1.0 mg/kg | 0.294 | 0.039 | 0.057 |
| Tri-SM6.1-αvβ6-AD07476) | | | |
| Group 7 (1.0 mg/kg | 0.230 | 0.037 | 0.038 |
| Tri-SM6.1-αvβ6-AD07477) | | | |

[0413] As shown in the data in Table 13 above, each of the RAGE RNAi agents showed significant AGER gene inhibition, with the RAGE RNAi agents targeted to inhibit expression at position 177 (Group 4 (80.5% inhibition) and Group 5 (87.5% inhibition)) provided slightly better inhibition compared to the RAGE RNAi agents targeting position 178 of the AGER gene (Group 6 (70.6% inhibition) and Group 7 (77% inhibition)).

### Example 3. In Vivo Intratracheal Administration of RAGE RNAi Agents in Mice

[0414] On study day 1, male c57bl/6 mice were administered 50 microliters via a microsprayer device (Penn Century, Philadelphia, PA) suitable for intratracheal (IT) administration of isotonic saline of isotonic saline or 3.0 mg/kg of one of the following RAGE RNAi agents:

TABLE 14
RAGE RNAi Agent and Dosing for Example 3

| Group ID | AC Duplex Number |
|---|---|
| Group 1 (isotonic saline) | N/A |
| Group 2 (1.0 mg/kg Tri-SM6.1-αvβ6-AD06949) | AC000614 |
| Group 3 (1.0 mg/kg Tri-SM6.1-αvβ6-AD07256) | AC000186 |
| Group 4 (1.0 mg/kg Tri-SM6.1-αvβ6-AD07478) | AC000820 |
| Group 5 (1.0 mg/kg Tri-SM6.1-αvβ6-AD07479) | AC000821 |
| Group 6 (1.0 mg/kg Tri-SM6.1-αvβ6-AD07480) | AC000822 |
| Group 7 (1.0 mg/kg Tri-SM6.1-αvβ6-AD07481) | AC000822 |

[0415] As noted in Table 14, each of the RAGE RNAi agents were conjugated to a tridentate small molecule αvβ6 epithelial cell targeting ligand (Tri-SM6.1, see FIG. 1) at the 5′ terminal end of the sense strand, formulated in isotonic saline.

[0416] The chemically modified sequences for RAGE RNAi agents AD07478, AD07479, AD07480, and AD07481 are shown in Table 7B (showing duplex), Table 3 (showing respective antisense strand), and Table 5 (showing respective sense strand with linker but without tridentate small molecule αvβ6 epithelial cell targeting ligand (Tri-SM6.1)).

[0417] The chemically modified sequences for RAGE RNAi agents AD06949 and AD07256 are shown in Example 2, above.

[0418] Five (5) mice were dosed per group. Mice were sacrificed on study day 8, and total RNA was isolated from both lungs following collection and homogenization. Murine AGER mRNA expression was quantitated by probe-based quantitative PCR, normalized to rat GAPDH expression, and expressed as fraction of vehicle control group (geometric mean, +/−95% confidence interval).

TABLE 15
Average Relative Murine RAGE mRNA
Expression at Sacrifice (Day 8) in Example 3.

| | Average Relative | | |
|---|---|---|---|
| | mAGER mRNA | | |
| | Expression | Low | High |
| Group ID | (n = 5) | (error) | (error) |
| Group 1 (isotonic saline) | 1.000 | 0.225 | 0.290 |
| Group 2 (1.0 mg/kg | 0.403 | 0.116 | 0.164 |
| Tri-SM6.1-αvβ6-AD06949) | | | |
| Group 3 (1.0 mg/kg | 0.358 | 0.153 | 0.268 |
| Tri-SM6.1-αvβ6-AD07256) | | | |
| Group 4 (1.0 mg/kg | 1.016 | 0.205 | 0.257 |
| Tri-SM6.1-αvβ6-AD07478) | | | |
| Group 5 (1.0 mg/kg | 1.063 | 0.132 | 0.150 |
| Tri-SM6.1-αvβ6-AD07479) | | | |
| Group 6 (1.0 mg/kg | 0.718 | 0.115 | 0.137 |
| Tri-SM6.1-αvβ6-AD07480) | | | |
| Group 7 (1.0 mg/kg | 0.681 | 0.077 | 0.086 |
| Tri-SM6.1-αvβ6-AD07481) | | | |

[0419] As shown in the data in Table 15 above, the RAGE RNAi agents of Groups 4 and 5 (targeting position 384) showed no inhibition and were completely inactive in vivo. The RAGE RNAi agents of Groups 6 and 7 (targeting position 391) showed relatively limited inhibition in vivo and appear insufficiently active to be considered as viable therapeutic candidates for treatment of humans.

### Example 4. In Vivo Intratracheal Administration of RAGE RNAi Agents in Rats

[0420] On study day 1, male Sprague Dawley rats were administered 200 microliters via a microsprayer device (Penn Century, Philadelphia, PA) suitable for intratracheal (IT) administration of isotonic saline or 0.5 mg/kg of one of the following RAGE RNAi agents:

TABLE 16
RAGE RNAi Agent and Dosing for Example 4

| Group ID | AC Duplex Number |
|---|---|
| Group 1 (isotonic saline) | N/A |
| Group 2 (0.5 mg/kg Tri-SM6.1-αvβ6-AD07474) | AC000286 |
| Group 3 (0.5 mg/kg Tri-SM6.1-αvβ6-AD07475) | AC000292 |
| Group 4 (0.5 mg/kg Tri-SM6.1-αvβ6-AD07700) | AC000790 |
| Group 5 (0.5 mg/kg Tri-SM6.1-αvβ6-AD07701) | AC000791 |
| Group 6 (0.5 mg/kg Tri-SM6.1-αvβ6-AD07702) | AC000792 |
| Group 7 (0.5 mg/kg Tri-SM6.1-αvβ6-AD07703) | AC000793 |
| Group 8 (0.5 mg/kg Tri-SM6.1-αvβ6-AD07704) | AC000438 |
| Group 9 (0.5 mg/kg Tri-SM6.1-αvβ6-AD07705) | AC000794 |
| Group 10 (0.5 mg/kg Tri-SM6.1-αvβ6-AD07706) | AC000795 |
| Group 11 (0.5 mg/kg Tri-SM6.1-αvβ6-AD07707) | AC000796 |
| Group 12 (0.5 mg/kg Tri-SM6.1-αvβ6-AD07708) | AC000439 |

[0421] As noted in Table 16, each of the RAGE RNAi agents were conjugated to a tridentate small molecule αvβ6 epithelial cell targeting ligand (Tri-SM6.1, see FIG. 1) at the 5′ terminal end of the sense strand, formulated in isotonic saline.

[0422] The chemically modified sequences for RAGE RNAi agents AD07474, AD07475, AD07700, AD07701, AD07702, AD07703, AD07704, AD07705, AD07706, AD07707, and AD07708 are shown in Table 7B (showing duplex), Table 3 (showing respective antisense strand), and Table 5 (showing respective sense strand with linker but without tridentate small molecule αvβ6 epithelial cell targeting ligand (Tri-SM6.1).

[0423] Five (5) rats were dosed per group. Rats were sacrificed on study day 8, and total RNA was isolated from both lungs following collection and homogenization. Rat AGER mRNA expression was quantitated by probe-based quantitative PCR, normalized to rat GAPDH expression, and expressed as fraction of vehicle control group (geometric mean, +/−95% confidence interval).

TABLE 17
Average Relative Rat RAGE mRNA Expression at
Sacrifice (Day 3) in Example 4

| | Average Relative | | |
|---|---|---|---|
| | rAGER mRNA | | |
| | Expression | Low | High |
| Group ID | (n = 5) | (error) | (error) |
| Group 1 (isotonic saline) | 1.000 | 0.075 | 0.081 |
| Group 2 (0.5 mg/kg | 0.355 | 0.147 | 0.250 |
| Tri-SM6.1-αvβ6-AD07474) | | | |
| Group 3 (0.5 mg/kg | 0.193 | 0.110 | 0.254 |
| Tri-SM6.1-αvβ6-AD07475) | | | |
| Group 4 (0.5 mg/kg | 0.233 | 0.060 | 0.080 |
| Tri-SM6.1-αvβ6-AD07700) | | | |
| Group 5 (0.5 mg/kg | 0.344 | 0.135 | 0.221 |
| Tri-SM6.1-αvβ6-AD07701) | | | |
| Group 6 (0.5 mg/kg | 0.194 | 0.036 | 0.044 |
| Tri-SM6.1-αvβ6-AD07702) | | | |
| Group 7 (0.5 mg/kg | 0.265 | 0.024 | 0.026 |
| Tri-SM6.1-αvβ6-AD07703) | | | |
| Group 8 (0.5 mg/kg | 0.174 | 0.030 | 0.036 |
| Tri-SM6.1-αvβ6-AD07704) | | | |
| Group 9 (0.5 mg/kg | 0.188 | 0.052 | 0.071 |
| Tri-SM6.1-αvβ6-AD07705) | | | |
| Group 10 (0.5 mg/kg | 0.215 | 0.077 | 0.119 |
| Tri-SM6.1-αvβ6-AD07706) | | | |
| Group 11 (0.5 mg/kg | 0.182 | 0.059 | 0.087 |
| Tri-SM6.1-αvβ6-AD07707) | | | |

[0424] As shown in the data in Table 17 above, each of the RAGE RNAi agents showed significant AGER gene inhibition at a dose of only 0.5 mg/kg. Each of the RAGE RNAi agents tested including different chemical modifications but all included underlying nucleotide sequences targeting position 177 of the AGER gene.

### Example 5. In Vivo Inhaled Aerosolized Administration of RAGE RNAi Agents in Rats

[0425] On study day 1, male Sprague Dawley rats were administered a single pulmonary deposited dose (PDD) of 0.5 mg/kg of the RAGE RNAi agent Tri-SM6.1-αvβ6-AD07475. Using a jet nebulizer (Misty Max 10), aerosol was delivered to a rodent single-tier flow-past nose-only inhalation exposure chamber (CH Technologies). One of the ports was equipped with a filter housing so that RNAi agent aerosol concentration could be assessed. Using an assumed respiratory minute volume allometrically scaled to rodent body weight, along with aerosol concentration determined from filter collection and RNAi agent quantification, exposure times were adjusted to target the reported PDD of 0.5 mg/kg. As noted, the RAGE RNAi agent was conjugated to a tridentate small molecule αvβ6 epithelial cell targeting ligand (Tri-SM6.1, see FIG. 1) at the 5′ terminal end of the sense strand, formulated in isotonic saline. The chemically modified sequences for RAGE RNAi agent AD07475 are shown in Table 7B (showing duplex), Table 3 (showing respective antisense strand), and Table 5 (showing respective sense strand with linker but without tridentate small molecule αvβ6 epithelial cell targeting ligand (Tri-SM6.1).

[0426] Five (5) rats were dosed per group. Rats were sacrificed on various study days after administration in accordance with the following schedule:

TABLE 18
RAGE RNAi Agent and Dosing for Example 5

| | Date Of |
|---|---|
| | Sacrifice After |
| Group ID | Administartion |
| Group 1 (isotonic saline) | Day 8 |
| Group 2 (Tri-SM6.1-αvβ6-AD07475) | Day 2 |
| Group 3 (Tri-SM6.1-αvβ6-AD07475) | Day 3 |
| Group 4 (Tri-SM6.1-αvβ6-AD07475) | Day 4 |
| Group 5 (Tri-SM6.1-αvβ6-AD07475) | Day 5 |
| Group 6 (Tri-SM6.1-αvβ6-AD07475) | Day 8 |
| Group 7 (Tri-SM6.1-αvβ6-AD07475) | Day 15 |
| Group 8 (Tri-SM6.1-αvβ6-AD07475) | Day 22 |
| Group 9 (Tri-SM6.1-αvβ6-AD07475) | Day 29 |
| Group 10 (Tri-SM6.1-αvβ6-AD07475) | Day 43 |
| Group 11 (Tri-SM6.1-αvβ6-AD07475) | Day 57 |

[0427] Upon sacrifice on the respective date, total RNA was isolated from both lungs following collection and homogenization. Rat AGER mRNA expression was quantitated by probe-based quantitative PCR, normalized to rat GAPDH expression, and expressed as fraction of vehicle control group (geometric mean, +/−95% confidence interval).

TABLE 19
Average Relative Rat RAGE mRNA Expression at Sacrifice in Example 5

| | Average Relative | | |
|---|---|---|---|
| | rAGER mRNA Expression | Low | High |
| Group ID | (n = 5) | (error) | (error) |
| Group 1 (isotonic saline; day 8 sacrifice) | 1.000 | 0.261 | 0.352 |
| Group 2 (0.5 mg/kg deposited dose Tri- | 0.428 | 0.074 | 0.090 |
| SM6.1-αvβ6-AD07475; day 2 sacrifice) | | | |
| Group 3 (0.5 mg/kg deposited dose Tri- | 0.179 | 0.025 | 0.028 |
| SM6.1-αvβ6-AD07475; day 3 sacrifice) | | | |
| Group 4 (0.5 mg/kg deposited dose Tri- | 0.077 | 0.014 | 0.017 |
| SM6.1-αvβ6-AD07475; day 4 sacrifice) | | | |
| Group 5 (0.5 mg/kg deposited dose Tri- | 0.061 | 0.005 | 0.005 |
| SM6.1-αvβ6-AD07475; day 5 sacrifice) | | | |
| Group 6 (0.5 mg/kg deposited dose Tri- | 0.042 | 0.005 | 0.006 |
| SM6.1-αvβ6-AD07475; day 8 sacrifice) | | | |
| Group 7 (0.5 mg/kg deposited dose Tri- | 0.042 | 0.007 | 0.009 |
| SM6.1-αvβ6-AD07475; day 15 sacrifice) | | | |
| Group 8 (0.5 mg/kg deposited dose Tri- | 0.049 | 0.010 | 0.012 |
| SM6.1-αvβ6-AD07475; day 22 sacrifice) | | | |
| Group 9 (0.5 mg/kg deposited dose Tri- | 0.097 | 0.014 | 0.016 |
| SM6.1-αvβ6-AD07475; day 29 sacrifice) | | | |
| Group 10 (0.5 mg/kg deposited dose Tri- | 0.137 | 0.015 | 0.017 |
| SM6.1-αvβ6-AD07475; day 43 sacrifice) | | | |
| Group 11 (0.5 mg/kg deposited dose Tri- | 0.123 | 0.013 | 0.015 |
| SM6.1-αvβP6-AD07475; day 57 sacrifice) | | | |

[0428] As shown in the data in Table 19 above, the RAGE RNAi agent AD07475 showed significant AGER gene inhibition at a dose of only 0.5 mg/kg, and the duration of knockdown was maintained through at least day 22 before slowly beginning to return to baseline levels, suggesting that monthly dosing (e.g., administration every 28 days) may be feasible.

### Example 6. In Vivo Inhaled Aerosolized Administration of RAGE RNAi Agents in Rats and Targeting Ligand Effect

[0429] On study day 1, male Sprague Dawley rats were administered a single dose at varying concentrations of the RAGE RNAi agent Tri-SM6.1-αvβ6-AD07475, or the RAGE RNAi agent AD7475 without the αvβ6 epithelial cell targeting ligand attached. Using a jet nebulizer (Misty Max 10), aerosol was delivered to a rodent single-tier flow-past nose-only inhalation exposure chamber (CH Technologies). One of the ports was equipped with a filter housing so that RNAi agent aerosol concentration could be assessed. Using an assumed respiratory minute volume allometrically scaled to rodent body weight, along with aerosol concentration determined from filter collection and RNAi agent quantification, exposure times were adjusted to target the reported PDD listed in Table 20. For the Groups that included the targeting ligand, the RAGE RNAi agent was conjugated to a tridentate small molecule αvβ6 epithelial cell targeting ligand (Tri-SM6.1, see FIG. 1) at the 5′ terminal end of the sense strand, formulated in isotonic saline. The chemically modified sequences for RAGE RNAi agent AD07475 are shown in Table 7B (showing duplex), Table 3 (showing respective antisense strand), and Table 5 (showing respective sense strand with linker but without tridentate small molecule αvβ6 epithelial cell targeting ligand (Tri-SM6.1). The dosing groups were as follows:

TABLE 20
RAGE RNAi Agent and Dosing for Example 6

| | AC Duplex |
|---|---|
| Group ID | Number |
| Group 1 (isotonic saline) | N/A |
| Group 2 (0.24 mg/kg deposited dose Tri-SM6.1-αvβ6-AD07475) | AC000292 |
| Group 3 (0.12 mg/kg deposited dose Tri-SM6.1-αvβ6-AD07475) | AC000292 |
| Group 4 (0.06 mg/kg deposited dose Tri-SM6.1-αvβ6-AD07475) | AC000292 |
| Group 5 (0.03 mg/kg deposited dose Tri-SM6.1-αvβ6-AD07475) | AC000292 |
| Group 6 (0.015 mg/kg deposited dose | AC000292 |
| Tri-SM6.1-αvβ6-AD07475) | |
| Group 7 (0.24 mg/kg deposited dose AD07475) | N/A |
| Group 8 (0.12 mg/kg deposited dose AD07475) | N/A |
| Group 9 (0.06 mg/kg deposited dose AD07475) | N/A |
| Group 10 (0.03 mg/kg deposited dose AD07475) | N/A |
| Group 11 (0.015 mg/kg deposited dose AD07475) | N/A |

[0430] Five (5) rats were dosed per group. Rats were sacrificed on study day 8, and total RNA was isolated from both lungs following collection and homogenization. Rat AGER mRNA expression was quantitated by probe-based quantitative PCR, normalized to rat GAPDH expression, and expressed as fraction of vehicle control group (geometric mean, +/−95% confidence interval).

TABLE 21
Average Relative Rat RAGE mRNA
Expression at Sacrifice in Example 6

| | Average | | |
|---|---|---|---|
| | Relative | | |
| | rAGER | | |
| | mRNA | | |
| | Expression | Low | High |
| Group ID | (n = 5) | (error) | (error) |
| Group 1 (isotonic saline) | 1.000 | 0.143 | 0.168 |
| Group 2 (0.24 mg/kg deposited | 0.081 | 0.010 | 0.011 |
| dose Tri-SM6.1-αvβ6-AD07475) | | | |
| Group 3 (0.12 mg/kg deposited | 0.081 | 0.019 | 0.025 |
| dose Tri-SM6.1-αvβ6-AD07475) | | | |
| Group 4 (0.06 mg/kg deposited | 0.130 | 0.033 | 0.043 |
| dose Tri-SM6.1-αvβ6-AD07475) | | | |
| Group 5 (0.03 mg/kg deposited | 0.342 | 0.112 | 0.165 |
| dose Tri-SM6.1-αvβ6-AD07475) | | | |
| Group 6 (0.015 mg/kg deposited | 0.436 | 0.088 | 0.110 |
| dose Tri-SM6.1-αvβ6-AD07475) | | | |
| Group 7 (0.24 mg/kg deposited | 0.107 | 0.032 | 0.046 |
| dose AD07475) | | | |
| Group 8 (0.12 mg/kg deposited | 0.157 | 0.041 | 0.055 |
| dose AD07475) | | | |
| Group 9 (0.06 mg/kg deposited | 0.309 | 0.067 | 0.086 |
| dose AD07475) | | | |
| Group 10 (0.03 mg/kg deposited | 0.436 | 0.120 | 0.165 |
| dose AD07475) | | | |
| Group 11 (0.015 mg/kg deposited | 0.537 | 0.052 | 0.058 |
| dose AD07475) | | | |

[0431] As shown in the data in Table 21 above, at each of the time points measured the RAGE RNAi agent AD07475 showed substantial inhibition compared to control both with and without a targeting ligand. Indeed, even at the lowest dose tested of 0.015 mg/kg deposited dose, inhibition levels approaching 50% (see Group 6 (with targeting ligand Tri-SM6.1-αvβ6; 56.4% gene inhibition) and Group 11 (no targeting ligand; 46.3% gene inhibition)). Further, at each of the respective dose levels measured, the RNAi agent conjugated to the targeting ligand numerically outperformed the RNAi agent without the targeting ligand (with the differences generally becoming more pronounced at lower dose levels), indicating the existence of a ligand effect that can provide increased inhibitory activity in vivo.

### Example 7. In Vivo Intratracheal Administration of RAGE RNAi Agents in Rats

[0432] On study day 1, male Sprague Dawley rats were administered 200 microliters via a microsprayer device (Penn Century, Philadelphia, PA) suitable for intratracheal (IT) administration of isotonic saline or 0.25 mg/kg of one of the following RAGE RNAi agents:

TABLE 22
RAGE RNAi Agent and Dosing for Example 7

| Group ID | AC Duplex Number |
|---|---|
| Group 1 (isotonic saline) | AC000286 |
| Group 2 (0.25 mg/kg Tri-SM6.1-αvβ36-AD07474) | AC000292 |
| Group 3 (0.25 mg/kg Tri-SM6.1-αvβ36-AD07475) | AC000293 |
| Group 4 (0.25 mg/kg Tri-SM6.1-αvβ36-AD07972) | AC000294 |
| Group 5 (0.25 mg/kg Tri-SM6.1-αvβ36-AD07973) | AC000290 |
| Group 6 (0.25 mg/kg Tri-SM6.1-αvβ36-AD07974) | AC000291 |
| Group 7 (0.25 mg/kg Tri-SM6.1-αvβ36-AD07975) | AC000312 |
| Group 8 (0.25 mg/kg Tri-SM6.1-αvβ36-AD07976) | AC000286 |

[0433] As noted in Table 22, each of the RAGE RNAi agents were conjugated to a tridentate small molecule αvβ6 epithelial cell targeting ligand (Tri-SM6.1, see FIG. 1) at the 5′ terminal end of the sense strand, formulated in isotonic saline.

[0434] The chemically modified sequences for RAGE RNAi agents AD07474, AD07475, AD07972, AD07973, AD07974, AD07975, and AD07976 are shown in Table 7B (showing duplex), Table 3 (showing respective antisense strand), and Table 5 (showing respective sense strand with linker but without tridentate small molecule αvβ6 epithelial cell targeting ligand (Tri-SM6.1).

[0435] Five (5) rats were dosed per group. Rats were sacrificed on study day 8, and total RNA was isolated from both lungs following collection and homogenization. Rat AGER mRNA expression was quantitated by probe-based quantitative PCR, normalized to rat GAPDH expression, and expressed as fraction of vehicle control group (geometric mean, +/−95% confidence interval).

TABLE 23
Average Relative Rat RAGE mRNA Expression at Sacrifice
(Day 8) in Example 7

| | Average Relative | | |
|---|---|---|---|
| | rAGER mRNA | | |
| | Expression | Low | High |
| Group ID | (n = 5) | (error) | (error) |
| Group 1 (isotonic saline) | 1.000 | 0.132 | 0.152 |
| Group 2 (0.25 mg/kg | 0.210 | 0.038 | 0.047 |
| Tri-SM6.1-αvβ-AD07474) | | | |
| Group 3 (0.25 mg/kg | 0.150 | 0.038 | 0.052 |
| Tri-SM6.1-αvβ-AD07475) | | | |
| Group 4 (0.25 mg/kg | 0.118 | 0.020 | 0.024 |
| Tri-SM6.1-αvβ-AD07972) | | | |
| Group 5 (0.25 mg/kg | 0.145 | 0.038 | 0.052 |
| Tri-SM6.1-αvβ-AD07973) | | | |
| Group 6 (0.25 mg/kg | 0.338 | 0.041 | 0.046 |
| Tri-SM6.1-αvβ-AD07974) | | | |
| Group 7 (0.25 mg/kg | 0.194 | 0.051 | 0.070 |
| Tri-SM6.1-αvβ-AD07975) | | | |
| Group 8 (0.25 mg/kg | 0.244 | 0.046 | 0.057 |
| Tri-SM6.1-αvβ-AD07976) | | | |

[0436] As shown in the data in Table 23 above, each of the RAGE RNAi agents showed significant AGER gene inhibition at a dose of only 0.25 mg/kg. Each of the RAGE RNAi agents tested including different chemical modifications but all included underlying nucleotide sequences targeting position 177 of the AGER gene.

### Example 8. In Vivo Intratracheal Administration of RAGE RNAi Agents in Rats

[0437] On study day 1, male Sprague Dawley rats were administered 200 microliters via a microsprayer device (Penn Century, Philadelphia, PA) suitable for intratracheal (IT) administration of isotonic saline or 0.25 mg/kg of one of the following RAGE RNAi agents:

TABLE 24
RAGE RNAi Agent and Dosing for Example 8

| Group ID | AC Duplex Number |
|---|---|
| Group 1 (isotonic saline) | N/A |
| Group 2 (0.1 mg/kg Tri-SM6.1-αvβ6-AD07475) | AC000292 |
| Group 3 (0.1 mg/kg Tri-SM6.1-αvβ6-AD07704) | AC000438 |
| Group 4 (0.1 mg/kg Tri-SM6.1-αvβ6-AD07708) | AC000439 |
| Group 5 (0.1 mg/kg Tri-SM6.1-αvβ6-AD08030) | AC000440 |
| Group 6 (0.1 mg/kg Tri-SM6.1-αvβ6-AD08031) | AC000441 |
| Group 7 (0.1 mg/kg Tri-SM6.1-αvβ6-AD08032) | AC000442 |
| Group 8 (0.1 mg/kg Tri-SM6.1-αvβ6-AD08033) | AC000414 |
| Group 9 (0.1 mg/kg Tri-SM6.1-αvβ6-AD08034) | AC000415 |
| Group 10 (0.1 mg/kg Tri-SM6.1-αvβ6-AD08035) | AC000416 |
| Group 11 (0.1 mg/kg Tri-SM6.1-αvβ6-AD08036) | AC000417 |
| Group 12 (0.1 mg/kg Tri-SM6.1-αvβ6-AD08037) | AC000418 |
| Group 13 (0.1 mg/kg Tri-SM6.1-αvβ6-AD08038) | AC000419 |
| Group 14 (0.1 mg/kg Tri-SM6.1-αvβ6-AD08039) | AC000420 |

[0438] As noted in Table 24, each of the RAGE RNAi agents were conjugated to a tridentate small molecule αvβ6 epithelial cell targeting ligand (Tri-SM6.1, see FIG. 1) at the 5′ terminal end of the sense strand, formulated in isotonic saline.

[0439] The chemically modified sequences for the RAGE RNAi agents in Example 8 are shown in Table 7B (showing duplex), Table 3 (showing respective antisense strand), and Table 5 (showing respective sense strand with linker but without tridentate small molecule αvβ6 epithelial cell targeting ligand (Tri-SM6.1).

[0440] Five (5) rats were dosed per group. Rats were sacrificed on study day 8, and total RNA was isolated from both lungs following collection and homogenization. Rat AGER mRNA expression was quantitated by probe-based quantitative PCR, normalized to rat GAPDH expression, and expressed as fraction of vehicle control group (geometric mean, +/−95% confidence interval).

TABLE 25
Average Relative Rat RAGE mRNA Expression at
Sacrifice (Day 8) in Example 8

| | Average Relative | | |
|---|---|---|---|
| | rAGER mRNA | | |
| | Expression | Low | High |
| Group ID | (n = 5) | (error) | (error) |
| Group 1 (isotonic saline) | 1.000 | 0.118 | 0.134 |
| Group 2 (0.1 mg/kg | 0.232 | 0.030 | 0.034 |
| Tri-SM6.1-αvβ6-AD07475) | | | |
| Group 3 (0.1 mg/kg | 0.372 | 0.049 | 0.057 |
| Tri-SM6.1-αvβ6-AD07704) | | | |
| Group 4 (0.1 mg/kg | 0.382 | 0.102 | 0.139 |
| Tri-SM6.1-αvβ6-AD07708) | | | |
| Group 5 (0.1 mg/kg | 0.268 | 0.054 | 0.067 |
| Tri-SM6.1-αvβ6-AD08030) | | | |
| Group 6 (0.1 mg/kg | 0.215 | 0.065 | 0.093 |
| Tri-SM6.1-αvβ6-AD08031) | | | |
| Group 7 (0.1 mg/kg | 0.314 | 0.034 | 0.038 |
| Tri-SM6.1-αvβ6-AD08032) | | | |
| Group 8 (0.1 mg/kg | 0.244 | 0.075 | 0.108 |
| Tri-SM6.1-αvβ6-AD08033) | | | |
| Group 9 (0.1 mg/kg | 0.723 | 0.078 | 0.088 |
| Tri-SM6.1-αvβ6-AD08034) | | | |
| Group 10 (0.1 mg/kg | 0.281 | 0.076 | 0.104 |
| Tri-SM6.1-αvβ6-AD08035) | | | |
| Group 11 (0.1 mg/kg | 0.288 | 0.029 | 0.033 |
| Tri-SM6.1-αvβ6-AD08036) | | | |
| Group 12 (0.1 mg/kg | 0.253 | 0.056 | 0.071 |
| Tri-SM6.1-αvβ6-AD08037) | | | |
| Group 13 (0.1 mg/kg | 0.359 | 0.105 | 0.149 |
| Tri-SM6.1-αvβ6-AD08038) | | | |
| Group 14 (0.1 mg/kg | 0.317 | 0.125 | 0.206 |
| Tri-SM6.1-αvβ6-AD08039) | | | |

[0441] As shown in the data in Table 25 above, each of the RAGE RNAi agents showed significant AGER gene inhibition at a dose of only 0.1 mg/kg. Each of the RAGE RNAi agents tested including different chemical modifications but all included underlying nucleotide sequences targeting position 177 of the AGER gene.

### Example 9. In Vivo Inhaled Aerosolized Administration of RAGE RNAi Agents in Cynomolgus Monkeys

[0442] On study day 1, female cynomolgus monkeys were administered a single dose at 1 mg/kg PDD of the RAGE RNAi agent Tri-SM6.1-αvβ6-AD09150, Tri-SM6.1-αvβ6-AD09151, or Tri-SM6.1-αvβ6-AD09152. Using a vibrating mesh nebulizer (Aeroneb® Solo), aerosol was delivered to restrained, anesthetized monkeys fitted with a primate inhalation helmet. One of the helmets was equipped with a filter housing so that RNAi agent aerosol concentration could be assessed. Using an assumed respiratory minute volume allometrically scaled to rodent body weight, along with aerosol concentration determined from filter collection and RNAi agent quantification, exposure times were adjusted to target the reported PDD listed in Table 26. The RAGE RNAi agent was conjugated to a tridentate small molecule αvβ6 integrin receptor targeting ligand (Tri-SM6.1, see FIG. 1) at the 5′ terminal end of the sense strand, formulated in isotonic saline. The chemically modified sequences for RAGE RNAi agents are shown in Table 7B (showing duplex), Table 3 (showing respective antisense strand), and Table 5 (showing respective sense strand with linker but without tridentate small molecule αvβ6 integrin receptor targeting ligand (Tri-SM6.1). The dosing groups were as follows:

TABLE 26
RAGE RNAi Agent and Dosing for Example 9
(calculated with 25% deposited fraction).

| | AC Duplex |
|---|---|
| Group ID | Number |
| Group 1 (isotonic saline) | N/A |
| Group 2 (0.98 mg/kg deposited dose | AC001266 |
| Tri-SM6.1-αvβ6-AD09150) | |
| Group 3 (1.05 mg/kg deposited dose | AC001267 |
| Tri-SM6.1-αvβ6-AD09151) | |
| Group 4 (1.04 mg/kg deposited dose | AC001268 |
| Tri-SM6.1-αvβ6-AD09152) | |

[0443] Three (3) monkeys were dosed per group. Monkeys were sacrificed on study day 15, and total RNA was isolated from lung samples following collection and homogenization. The data in the following Table 27 shows mRNA expression sampled from the distal left caudal lobe. The data in the following Table 28 shows mRNA expression sampled from the distal right caudal lobe. Cynomolgus monkey AGER mRNA expression was quantitated by probe-based quantitative PCR, normalized to Cynomolgus monkey beta-actin expression, and expressed as fraction of vehicle control group (geometric mean, +/−95% confidence interval).

TABLE 27
Average Relative Cynomolgus Monkey RAGE
mRNA Expression, Distal Left
Caudal Lobe, at Sacrifice in Example 9.

| | Average Relative | | |
|---|---|---|---|
| | cAGER mRNA | Low | High |
| Group ID | Expression (n = 3) | (error) | (error) |
| Group 1 (isotonic saline) | 1.000 | 0.342 | 0.520 |
| Group 2 (0.98 mg/kg | 0.113 | 0.069 | 0.178 |
| deposited dose Tri- | | | |
| SM6.1-αvβ6-AD09150) | | | |
| Group 3 (1.05 mg/kg | 0.081 | 0.040 | 0.079 |
| deposited dose Tri- | | | |
| SM6.1-αvβ6-AD09151) | | | |
| Group 4 (1.04 mg/kg | 0.708 | 0.437 | 1.142 |
| deposited dose Tri- | | | |
| SM6.1-αvβ6-AD09152) | | | |

TABLE 28
Average Relative Cynomolgus Monkey RAGE
mRNA Expression, Distal
Right Caudal Lobe, at Sacrifice in Example 9.

| | Average Relative | | |
|---|---|---|---|
| | cAGER mRNA | Low | High |
| Group ID | Expression (n = 3) | (error) | (error) |
| Group 1 (isotonic saline) | 1.000 | 0.330 | 0.492 |
| Group 2 (0.98 mg/kg | 0.069 | 0.032 | 0.059 |
| deposited dose Tri- | | | |
| SM6.1-αvβ6-AD09150) | | | |
| Group 3 (1.05 mg/kg | 0.069 | 0.028 | 0.049 |
| deposited dose Tri- | | | |
| SM6.1-αvβ6-AD09151) | | | |
| Group 4 (1.04 mg/kg | 0.630 | 0.406 | 1.141 |
| deposited dose Tri- | | | |
| SM6.1-αvβ6-AD09152) | | | |

[0444] As shown in the data in Table 28 above, RNAi agent AD09150 and AD09151 showed substantial inhibition (93%) compared to control, demonstrating the ability to robustly silence AGER expression in non-human primates.

[0445] In a separate qPCR assay, cynomolgus monkey AGER mRNA expression was quantified. The data in the following Tables 29 through 42 show mRNA expression sampled from the cynomolgus lung samples. Cynomolgus monkey AGER mRNA expression was quantitated by probe-based quantitative PCR, normalized to Cynomolgus monkey beta-actin expression, and expressed as fraction of vehicle control group (geometric mean, +/−95% confidence interval). Some lung tissue was repeated with different tissue samples, when available, for example, Distal Left Caudal Lobe and Distal Left Cranial Lobe.

TABLE 29
Average Relative Cynomolgus Monkey
RAGE mRNA Expression, Distal Left
Caudal Lobe, at Sacrifice in Example 9.

| | Average Relative | | |
|---|---|---|---|
| | cAGER mRNA | Low | High |
| Group ID | Expression (n = 3) | (error) | (error) |
| Group 1 (isotonic saline) | 1.000 | 0.272 | 0.373 |
| Group 2 (0.98 mg/kg | 0.138 | 0.097 | 0.330 |
| deposited dose Tri- | | | |
| SM6.1-αvβ6-AD09150) | | | |
| Group 3 (1.05 mg/kg | 0.065 | 0.031 | 0.059 |
| deposited dose Tri- | | | |
| SM6.1-αvβ6-AD09151) | | | |
| Group 4 (1.04 mg/kg | 0.850 | 0.435 | 0.890 |
| deposited dose Tri- | | | |
| SM6.1-αvβ6-AD09152) | | | |

TABLE 30
Average Relative Cynomolgus Monkey
RAGE mRNA Expression, Medial
Left Caudal Lobe, at Sacrifice in Example 9.

| | Average Relative | | |
|---|---|---|---|
| | cAGER mRNA | Low | High |
| Group ID | Expression (n = 3) | (error) | (error) |
| Group 1 (isotonic saline) | 1.000 | 0.433 | 0.762 |
| Group 2 (0.98 mg/kg | 0.122 | 0.086 | 0.298 |
| deposited dose Tri- | | | |
| SM6.1-αvβ6-AD09150) | | | |
| Group 3 (1.05 mg/kg | 0.133 | 0.039 | 0.054 |
| deposited dose Tri- | | | |
| SM6.1-αvβ6-AD09151) | | | |
| Group 4 (1.04 mg/kg | 0.877 | 0.528 | 1.329 |
| deposited dose Tri- | | | |
| SM6.1-αvβ6-AD09152) | | | |

TABLE 31
Average Relative Cynomolgus Monkey
RAGE mRNA Expression, Proximal
Left Caudal Lobe, at Sacrifice in Example 9.

| | Average Relative | | |
|---|---|---|---|
| | cAGER mRNA | Low | High |
| Group ID | Expression (n = 3) | (error) | (error) |
| Group 1 (isotonic saline) | 1.000 | 0.297 | 0.422 |
| Group 2 (0.98 mg/kg | 0.152 | 0.094 | 0.246 |
| deposited dose Tri- | | | |
| SM6.1-αvβ6-AD09150) | | | |
| Group 3 (1.05 mg/kg | 0.084 | 0.032 | 0.053 |
| deposited dose Tri- | | | |
| SM6.1-αvβ6-AD09151) | | | |
| Group 4 (1.04 mg/kg | 0.781 | 0.446 | 1.038 |
| deposited dose Tri- | | | |
| SM6.1-αvβ6-AD09152) | | | |

TABLE 32
Average Relative Cynomolgus Monkey
RAGE mRNA Expression, Distal Left
Cranial Lobe, at Sacrifice in Example 9.

| | Average Relative | | |
|---|---|---|---|
| | cAGER mRNA | Low | High |
| Group ID | Expression (n = 3) | (error) | (error) |
| Group 1 (isotonic saline) | 1.000 | 0.231 | 0.300 |
| Group 2 (0.98 mg/kg | 0.126 | 0.072 | 0.166 |
| deposited dose Tri- | | | |
| SM6.1-αvβ6-AD09150) | | | |
| Group 3 (1.05 mg/kg | 0.104 | 0.056 | 0.119 |
| deposited dose Tri- | | | |
| SM6.1-αvβ6-AD09151) | | | |
| Group 4 (1.04 mg/kg | 0.549 | 0.370 | 1.134 |
| deposited dose Tri- | | | |
| SM6.1-αvβ6-AD09152) | | | |

TABLE 33
Average Relative Cynomolgus Monkey
RAGE mRNA Expression, Distal Left
Cranial Lobe, at Sacrifice in Example 9.

| | Average Relative | | |
|---|---|---|---|
| | cAGER mRNA | Low | High |
| Group ID | Expression (n = 3) | (error) | (error) |
| Group 1 (isotonic saline) | 1.000 | 0.306 | 0.440 |
| Group 2 (0.98 mg/kg | 0.076 | 0.045 | 0.113 |
| deposited dose Tri- | | | |
| SM6.1-αvβ6-AD09150) | | | |
| Group 3 (1.05 mg/kg | 0.048 | 0.019 | 0.031 |
| deposited dose Tri- | | | |
| SM6.1-αvβ6-AD09151) | | | |
| Group 4 (1.04 mg/kg | 0.548 | 0.355 | 1.008 |
| deposited dose Tri- | | | |
| SM6.1-αvβ6-AD09152) | | | |

TABLE 34
Average Relative Cynomolgus
Monkey RAGE mRNA Expression, Medial
Left Cranial Lobe, at Sacrifice in Example 9.

| | Average Relative | | |
|---|---|---|---|
| | cAGER mRNA | Low | High |
| Group ID | Expression (n = 3) | (error) | (error) |
| Group 1 (isotonic saline) | 1.000 | 0.383 | 0.620 |
| Group 2 (0.98 mg/kg | 0.157 | 0.116 | 0.447 |
| deposited dose Tri- | | | |
| SM6.1-αvβ6-AD09150) | | | |
| Group 3 (1.05 mg/kg | 0.054 | 0.028 | 0.059 |
| deposited dose Tri- | | | |
| SM6.1-αvβ6-AD09151) | | | |
| Group 4 (1.04 mg/kg | 0.826 | 0.485 | 1.175 |
| deposited dose Tri- | | | |
| SM6.1-αvβ6-AD09152) | | | |

TABLE 35
Average Relative Cynomolgus
Monkey RAGE mRNA Expression, Proximal
Left Cranial Lobe, at Sacrifice in Example 9.

| | Average Relative | | |
|---|---|---|---|
| | cAGER mRNA | Low | High |
| Group ID | Expression (n = 3) | (error) | (error) |
| Group 1 (isotonic saline) | 1.000 | 0.174 | 0.211 |
| Group 2 (0.98 mg/kg | 0.106 | 0.074 | 0.242 |
| deposited dose Tri- | | | |
| SM6.1-αvβ6-AD09150) | | | |
| Group 3 (1.05 mg/kg | 0.106 | 0.053 | 0.104 |
| deposited dose Tri- | | | |
| SM6.1-αvβ6-AD09151) | | | |
| Group 4 (1.04 mg/kg | 0.404 | 0.275 | 0.864 |
| deposited dose Tri- | | | |
| SM6.1-αvβ6-AD09152) | | | |

TABLE 36
Average Relative Cynomolgus Monkey
RAGE mRNA Expression, Distal
Right Caudal Lobe, at Sacrifice in Example 9.

| | Average Relative | | |
|---|---|---|---|
| | cAGER mRNA | Low | High |
| Group ID | Expression (n = 3) | (error) | (error) |
| Group 1 (isotonic saline) | 1.000 | 0.070 | 0.075 |
| Group 2 (0.98 mg/kg | 0.116 | 0.081 | 0.267 |
| deposited dose Tri- | | | |
| SM6.1-αvβ6-AD09150) | | | |
| Group 3 (1.05 mg/kg | 0.050 | 0.027 | 0.059 |
| deposited dose Tri- | | | |
| SM6.1-αvβ6-AD09151) | | | |
| Group 4 (1.04 mg/kg | 0.690 | 0.222 | 0.328 |
| deposited dose Tri- | | | |
| SM6.1-αvβ6-AD09152) | | | |

TABLE 37
Average Relative Cynomolgus Monkey
RAGE mRNA Expression, Medial
Right Caudal Lobe, at Sacrifice in Example 9.

| | Average Relative | | |
|---|---|---|---|
| | cAGER mRNA | Low | High |
| Group ID | Expression (n = 3) | (error) | (error) |
| Group 1 (isotonic saline) | 1.000 | 0.493 | 0.972 |
| Group 2 (0.98 mg/kg | 0.243 | 0.145 | 0.359 |
| deposited dose Tri- | | | |
| SM6.1-αvβ6-AD09150) | | | |
| Group 3 (1.05 mg/kg | 0.124 | 0.057 | 0.105 |
| deposited dose Tri- | | | |
| SM6.1-αvβ6-AD09151) | | | |
| Group 4 (1.04 mg/kg | 0.549 | 0.184 | 0.277 |
| deposited dose Tri- | | | |
| SM6.1-αvβ6-AD09152) | | | |

TABLE 38
Average Relative Cynomolgus Monkey
RAGE mRNA Expression, Proximal
Right Caudal Lobe, at Sacrifice in Example 9.

| | Average Relative | | |
|---|---|---|---|
| | cAGER mRNA | Low | High |
| Group ID | Expression (n = 3) | (error) | (error) |
| Group 1 (isotonic saline) | 1.000 | 0.451 | 0.821 |
| Group 2 (0.98 mg/kg | 0.160 | 0.088 | 0.198 |
| deposited dose Tri- | | | |
| SM6.1-αvβ6-AD09150) | | | |
| Group 3 (1.05 mg/kg | 0.122 | 0.078 | 0.216 |
| deposited dose Tri- | | | |
| SM6.1-αvβ6-AD09151) | | | |
| Group 4 (1.04 mg/kg | 0.262 | 0.175 | 0.522 |
| deposited dose Tri- | | | |
| SM6.1-αvβ6-AD09152) | | | |

TABLE 39
Average Relative Cynomolgus Monkey
RAGE mRNA Expression, Distal
Right Cranial Lobe, at Sacrifice in Example 9.

| | Average Relative | | |
|---|---|---|---|
| | cAGER mRNA | Low | High |
| Group ID | Expression (n = 3) | (error) | (error) |
| Group 1 (isotonic saline) | 1.000 | 0.161 | 0.192 |
| Group 2 (0.98 mg/kg | 0.268 | 0.142 | 0.300 |
| deposited dose Tri- | | | |
| SM6.1-αvβ6-AD09150) | | | |
| Group 3 (1.05 mg/kg | 0.097 | 0.039 | 0.066 |
| deposited dose Tri- | | | |
| SM6.1-αvβ6-AD09151) | | | |
| Group 4 (1.04 mg/kg | 0.395 | 0.243 | 0.634 |
| deposited dose Tri- | | | |
| SM6.1-αvβ6-AD09152) | | | |

TABLE 40
Average Relative Cynomolgus Monkey
RAGE mRNA Expression, Distal
Right Cranial Lobe, at Sacrifice in Example 9.

| | Average Relative | | |
|---|---|---|---|
| | cAGER mRNA | Low | High |
| Group ID | Expression (n = 3) | (error) | (error) |
| Group 1 (isotonic saline) | 1.000 | 0.362 | 0.568 |
| Group 2 (0.98 mg/kg | 0.172 | 0.112 | 0.320 |
| deposited dose Tri- | | | |
| SM6.1-αvβ6-AD09150) | | | |
| Group 3 (1.05 mg/kg | 0.156 | 0.034 | 0.044 |
| deposited dose Tri- | | | |
| SM6.1-αvβ6-AD09151) | | | |
| Group 4 (1.04 mg/kg | 0.923 | 0.613 | 1.820 |
| deposited dose Tri- | | | |
| SM6.1-αvβ6-AD09152) | | | |

TABLE 41
Average Relative Cynomolgus Monkey
RAGE mRNA Expression, Medial
Right Cranial Lobe, at Sacrifice in Example 9.

| | Average Relative | | |
|---|---|---|---|
| | cAGER mRNA | Low | High |
| Group ID | Expression (n = 3) | (error) | (error) |
| Group 1 (isotonic saline) | 1.000 | 0.496 | 0.984 |
| Group 2 (0.98 mg/kg | 0.301 | 0.154 | 0.315 |
| deposited dose Tri- | | | |
| SM6.1-αvβ6-AD09150) | | | |
| Group 3 (1.05 mg/kg | 0.098 | 0.050 | 0.100 |
| deposited dose Tri- | | | |
| SM6.1-αvβ6-AD09151) | | | |
| Group 4 (1.04 mg/kg | 0.303 | 0.233 | 1.007 |
| deposited dose Tri- | | | |
| SM6.1-αvβ6-AD09152) | | | |

TABLE 42
Average Relative Cynomolgus Monkey
RAGE mRNA Expression, Proximal
Right Cranial Lobe, at Sacrifice in Example 9.

| | Average Relative | | |
|---|---|---|---|
| | cAGER mRNA | Low | High |
| Group ID | Expression (n = 3) | (error) | (error) |
| Group 1 (isotonic saline) | 1.000 | 0.098 | 0.108 |
| Group 2 (0.98 mg/kg | 0.156 | 0.075 | 0.146 |
| deposited dose Tri- | | | |
| SM6.1-αvβ6-AD09150) | | | |
| Group 3 (1.05 mg/kg | 0.080 | 0.047 | 0.114 |
| deposited dose Tri- | | | |
| SM6.1-αvβ6-AD09151) | | | |
| Group 4 (1.04 mg/kg | 0.445 | 0.198 | 0.358 |
| deposited dose Tri- | | | |
| SM6.1-αvβ6-AD09152) | | | |

[0446] As shown in the data in Tables 29 through 42 above, RNAi agent AD09150 and AD09151 showed substantial inhibition (up to 92%) compared to control, demonstrating the ability to robustly silence AGER expression in non-human primates.

### Example 10. In Vivo Anti-Inflammatory Effect of RAGE Knock-Down in Rat Model of Airway Inflammation, Delivery Via Aerosol

[0447] On study day 1 and again on study day 15, male Sprague Dawley rats were administered a 0.5 mg/kg deposited dose of the RAGE RNAi agent Tri-SM6.1-αvβ6-AD07475, or a vehicle control without an RNAi agent, in accordance with Table 43 below. Using a jet nebulizer (Misty Max 10), aerosol was delivered to a rodent single-tier flow-past nose-only inhalation exposure chamber (CH Technologies). One of the ports was equipped with a filter housing so that RNAi agent aerosol concentration could be assessed. Using an assumed respiratory minute volume allometrically scaled to rodent body weight, along with aerosol concentration determined from filter collection and RNAi agent quantification.

[0448] On day 40, rats in Group 4 and Group 5 were challenged with a single intra-tracheal dose of 400 ug/rat of Alternaria alternata (Alt) prepared in saline, and rats in Group 2 and 3 where administered a 400 ug/rat dose of saline control. Rats in Group N-1 were naïve and had no treatment administered.

TABLE 43
RAGE RNAi Agent and Dosing for Example 10.

| | AC Duplex | Animals |
|---|---|---|
| Group ID | Number | per Group |
| Group 1 (naïve: no treatment) | N/A | 3 |
| Group 2 (saline aerosol days 1 and 15)/ | N/A | 5 |
| (saline IT day 40) | | |
| Group 3 (0.5 mg/kg deposited dose Tri-SM6.1- | AC000292 | 5 |
| αvβ6-AD07475 days 1 and 15)/(saline IT day 40) | | |
| Group 4 (saline aerosol days 1 and 15)/(Alternaria | N/A | 7 |
| IT day 40) | | |
| Group 5 (0.5 mg/kg deposited dose Tri-SM6.1- | AC000292 | 7 |
| αvβ6-AD07475)/(Alternaria IT day 40) | | |

[0449] After 48 hours post-administration of the Alternaria (i.e., Day 42), rats were anesthetized with isoflurane/O₂, had blood drawn, and were euthanized by exsanguination. Trachea was canulated and bronchoalveolar lavage (BAL) was collected after washing with 2×10 mL of ice-cold PBS. BAL samples were spun down, cells resuspended with 1 mL of ice-cold PBS, and aliquot was mixed with Turk's solution (ratio 1:1), and total cell counted via hemocytomers. Cytospins were prepared, stained and differential cell counting performed. Supernatant was used for soluble RAGE (sRAGE) and cytokines measurements. One lobe was used to determine AGER mRNA expression and tissue samples were analyzed to assess concentration of RAGE protein.

[0450] Granulocytes, both eosinophils and neutrophils, are well known markers for cellular inflammation. For the BAL samples, the total and differential cells were counted and the number of inflammatory cells were derived. Group 5 (in which RAGE RNAi agent was administered and the tissues were challenged by Alternaria) showed a reduction of inflammatory cells as compared to Group 4 (in which no RNAi agent was administered).

[0451] Further, VEGF is known to cause vascular remodeling and is induced by inflammation. The groups administered with RAGE RNAi agent (Groups 3 and 5) showed reductions in VEGF levels in the BAL samples examined.

### Example 11. In Vivo Anti-Inflammatory Effect of RAGE Knock-Down in Rat Model of Airway Inflammation, Delivery Via Intra-Tracheal Microsprayer

[0452] On study day 1, day 8, and day 29, male Brown-Norway rats were administered a dose of 3 mg/kg (1.5 mL/kg) of the RAGE RNAi agent Tri-SM6.1-αvβ6-AD07475 or vehicle. Volume calculated at 1.5 mL/kg was loaded into a syringe that was connected to a microsprayer device (Penn Century, Philadelphia, PA).

[0453] On day 43, rats in Group 3 and Group 4 were challenged with a single intra-tracheal dose of 400 ug/rat of Alternaria alternata prepared in saline, and rats in Group 1 and 2 were administered a 400 ug/rat dose of saline control. Rats in Group N-1 were naïve and had no treatment administered.

TABLE 44
RAGE RNAi Agent and Dosing for Example 11.

| | AC Duplex | Animals |
|---|---|---|
| Group ID | Number | per Group |
| Group N-1 (naïve: no treatment) | N/A | 4 |
| Group 1 (saline IT days 1, 8, and 29)/(saline | N/A | 6 |
| IT day 43) | | |
| Group 2 (IT dose 3.0 mg/kg Tri-SM6.1-αvβ6- | AC000292 | 4 |
| AD07475 on days 1, 8, and 29)/(Alternaria | | |
| IT day 43) | | |
| Group 3 (saline IT days 1 and 15)/(saline day 43) | N/A | 8 |
| Group 4 (IT dose 3.0 mg/kg Tri-SM6.1-αvβ6- | AC000292 | 8 |
| AD07475 on days 1, 8, and 29)/(Alternaria | | |
| IT day 43) | | |

[0454] After 48 hours post-administration of the Alternaria (i.e. day 45), rats were anesthetized with isoflurane/O₂, blood was drawn, and were euthanized by exsanguination. Trachea was canulated and bronchoalveolar lavage (BAL) collected after washing with 2×10 mL of ice-cold PBS. BAL samples were spun down, cells resuspended with 1 mL of ice-cold PBS, and aliquot was mixed with Turk's solution (ratio 1:1), and total cell counted via hemocytomers. Cytospins were prepared, stained and differential cell counting performed. Supernatant was used for soluble RAGE (sRAGE) and cytokines measurements. One lobe was used to determine AGER mRNA expression and part of tissue was used to determine tissue concentration of RAGE protein.

[0455] Soluble RAGE (sRAGE) was measured in the serum and bronchoalveolar lavage fluid (BALF) samples by ELISA. sRAGE was nearly completely reduced by administration of the RAGE RNAi agents (see Groups 2 and 4).

[0456] Further, as noted in the prior Example, granulocytes (both eosinophils and neutrophils) are well known markers for cellular inflammation. For the BAL samples, the total and differential cells were counted and the number of inflammatory cells were derived. The impact of RAGE inhibition by the RAGE RNAi agents disclosed herein on eosinophilic inflammation induced by Alternaria extract was assessed. Group 4 (treated with RAGE RNAi agent) showed a reduction in total granulocytes compared to Group 3 (no RAGE RNAi agent administered).

[0457] Other biomarkers, such as MIP1a, IL-13, IP-10 and VEGF, are also indicative of cellular inflammation. For the Alternaria challenged groups, administration of the RAGE RNAi agent (Group 4) resulted in a reductions of each of these pro-inflammatory biomarkers compared to the group in which no RAGE RNAi agent was administered (Group 3).

### Example 12. Dose Response of In Vivo Inhaled Aerosolized Administration of RAGE RNAi Agents in Cynomolgus Monkeys

[0458] Fifteen (15) female cynomolgus animals were randomly assigned to five (5) treatment groups. The animals were dosed according to as summarized in the following Table 45. Animals were fasted the night before study days requiring anesthesia, but given water ad libitum. Animals were anesthetized with ketamine hydrochloride (5-10 mg/kg, IM), followed by isoflurane inhalation. Animals were initially anesthetized with isoflurane (4-5%) using a mask until a properly sized cuffed endotracheal tube was inserted, just proximal to the carina to allow the insertion of a pediatric fiberoptic bronchoscope to perform bronchoalveolar lavage (BAL) and to allow exposure through the endotracheal tube. Anesthetized animals were moved to the exposure system and connected to the ventilator. Anaesthetized and ventilated animals received a single inhalation exposure with either isotonic saline or RAGE RNAi agent Tri-SM6.1-αvβ6-AD09151 (AC001267). Animals were ventilated during the duration of the exposure using a Harvard pump set to 10 to 15 mL/kg tidal volume, 30 breaths per minute and inspiratory volume of 35:65. After finishing the exposure, the anesthesia was removed and animal then covered with blankets or Bair Hugger at a recovery station and connected to a monitor device for continuous capture of heart rate and O₂ saturation. The RAGE RNAi agent was conjugated to a tridentate small molecule αvβ6 epithelial cell targeting ligand (Tri-SM6.1, see FIG. 1) at the 5′ terminal end of the sense strand, formulated in isotonic saline. The chemically modified sequences for RAGE RNAi agents are shown in Table 7B (showing duplex), Table 3 (showing respective antisense strand), and Table 5 (showing respective sense strand with linker but without tridentate small molecule αvβ6 epithelial cell targeting ligand (Tri-SM6.1).

TABLE 45
RAGE RNAi Agent and Dosing for Example 12.

| | | Animals | Targeted | Calculated |
|---|---|---|---|---|
| | AC Duplex | per | Deposited | Deposited |
| Group ID | Number | Group | Dose/Animal | Dose |
| Group 1 (isotonic | N/A | 3 | (same exposure | N/A |
| saline) | | | time as Groups 2 | |
| | | | through 5) | |
| Group 2 (Tri-SM6.1- | AC001267 | 3 | 0.0625 mg/kg | 0.13 mg/kg |
| αvβ6-AD09151) | | | | |
| Group 3 (Tri-SM6.1- | AC001267 | 3 | 0.125 mg/kg | 0.20 mg/kg |
| αvβ6-AD09151) | | | | |
| Group 4 (Tri-SM6.1- | AC001267 | 3 | 0.25 mg/kg | 0.31 mg/kg |
| αvβ6-AD09151) | | | | |
| Group 5 (Tri-SM6.1- | AC001267 | 3 | 0.5 mg/kg | 0.47 mg/kg |
| αvβ6-AD09151) | | | | |

[0459] Bronchoalveolar lavage (BAL) and blood (serum) were collected at −7 days prior to exposure and 2-4 weeks after inhalation exposure (Days −7, 15, 29). All animals were euthanized just before sample collection on Day 29 to collect lung tissue.

[0460] The left lung of each animal was harvested for histology. The right lung was obtained, lobes separated, individually weighted and snap frozen. Separate lobes were sectioned in three (3) approximately equal pieces sliced at a longitudinal plane, perpendicular to the airway. Namely, separate lobes were sectioned in three (3) approximately equal pieces at a longitudinal plane, perpendicular to the airway, namely the proximal, medial, and distal. For cranial and medial lobes, two to three equally divided samples were collected from proximal slice, and three from the other two slices. Approximately equal size tissue cubes were obtained with presence and absence of visible airways.

[0461] The data in the following Tables 47 through 71 show mRNA expression sampled from the cynomolgus lung samples. Cynomolgus monkey AGER mRNA expression was quantitated by probe-based quantitative PCR, normalized to Cynomolgus monkey GAPDH expression, and expressed as fraction of vehicle control group (geometric mean, +/−95% confidence interval).

TABLE 47
Average Relative Cynomolgus Monkey RAGE mRNA Expression,
Right Distal Cranial Lobe, at Sacrifice in Example 12.

| | Average Relative | | |
|---|---|---|---|
| | cAGER mRNA | Low | High |
| Group ID | Expression (n = 3) | (error) | (error) |
| Group 1 (isotonic saline) | 1.000 | 0.111 | 0.125 |
| Group 2 (0.13 mg/kg deposited | 0.406 | 0.113 | 0.156 |
| dose Tri-SM6.1-αvβ6-AD09151) | | | |
| Group 3 (0.20 mg/kg deposited | 0.589 | 0.165 | 0.229 |
| dose Tri-SM6.1-αvβ6-AD09151) | | | |
| Group 4 (0.31 mg/kg deposited | 0.353 | 0.076 | 0.096 |
| dose Tri-SM6.1-αvβ6-AD09151) | | | |
| Group 5 (0.47 mg/kg deposited | 0.358 | 0.139 | 0.227 |
| dose Tri-SM6.1-αvβ6-AD09151) | | | |

TABLE 48
Average Relative Cynomolgus Monkey RAGE mRNA Expression, Right
Distal Middle Lobe, at Sacrifice in Example 12.

| | Average Relative | | |
|---|---|---|---|
| | cAGER mRNA | Low | High |
| Group ID | Expression (n = 3) | (error) | (error) |
| Group 1 (isotonic saline) | 1.000 | 0.156 | 0.185 |
| Group 2 (0.13 mg/kg deposited dose Tri- | 0.373 | 0.106 | 0.149 |
| SM6.1-αvβ6-AD09151) | | | |
| Group 3 (0.20 mg/kg deposited dose Tri- | 0.468 | 0.126 | 0.172 |
| SM6.1-αvβ6-AD09151) | | | |
| Group 4 (0.31 mg/kg deposited dose Tri- | 0.226 | 0.047 | 0.061 |
| SM6.1-αvβ6-AD09151) | | | |
| Group 5 (0.47 mg/kg deposited dose Tri- | 0.208 | 0.068 | 0.101 |
| SM6.1-αvβ6-AD09151) | | | |

TABLE 49
Average Relative Cynomolgus Monkey RAGE mRNA Expression, Right
Distal Caudal Lobe, at Sacrifice in Example 12.

| | Average Relative | | |
|---|---|---|---|
| | cAGER mRNA | Low | High |
| Group ID | Expression (n = 3) | (error) | (error) |
| Group 1 (isotonic saline) | 1.000 | 0.070 | 0.075 |
| Group 2 (0.13 mg/kg deposited dose Tri- | 0.327 | 0.053 | 0.063 |
| SM6.1-αvβ6-AD09151) | | | |
| Group 3 (0.20 mg/kg deposited dose Tri- | 0.432 | 0.041 | 0.045 |
| SM6.1-αvβ6-AD09151) | | | |
| Group 4 (0.31 mg/kg deposited dose Tri- | 0.338 | 0.146 | 0.278 |
| SM6.1-αvβ6-AD09151) | | | |
| Group 5 (0.47 mg/kg deposited dose Tri- | 0.155 | 0.032 | 0.041 |
| SM6.1-αvβ6-AD09151) | | | |

TABLE 50
Average Relative Cynomolgus Monkey RAGE mRNA Expression, Right
Proximal Caudal Hilar Lobe, at Sacrifice in Example 12.

| | Average Relative | | |
|---|---|---|---|
| | cAGER mRNA | Low | High |
| Group ID | Expression (n = 3) | (error) | (error) |
| Group 1 (isotonic saline) | 1.000 | 0.200 | 0.250 |
| Group 2 (0.13 mg/kg deposited dose Tri- | 0.436 | 0.113 | 0.153 |
| SM6.1-αvβ6-AD09151) | | | |
| Group 3 (0.20 mg/kg deposited dose Tri- | 0.449 | 0.073 | 0.087 |
| SM6.1-αvβ6-AD09151) | | | |
| Group 4 (0.31 mg/kg deposited dose Tri- | 0.371 | 0.055 | 0.064 |
| SM6.1-αvβ6-AD09151) | | | |
| Group 5 (0.47 mg/kg deposited dose Tri- | 0.337 | 0.099 | 0.140 |
| SM6.1-αvβ6-AD09151) | | | |

TABLE 51
Average Relative Cynomolgus Monkey RAGE mRNA Expression, Right
Proximal Middle Hilar Lobe, at Sacrifice in Example 12.

| | Average Relative | | |
|---|---|---|---|
| | cAGER mRNA | Low | High |
| Group ID | Expression (n = 3) | (error) | (error) |
| Group 1 (isotonic saline) | 1.000 | 0.090 | 0.098 |
| Group 2 (0.13 mg/kg deposited dose Tri- | 0.491 | 0.128 | 0.172 |
| SM6.1-αvβ6-AD09151) | | | |
| Group 3 (0.20 mg/kg deposited dose Tri- | 0.597 | 0.090 | 0.106 |
| SM6.1-αvβ6-AD09151) | | | |
| Group 4 (0.31 mg/kg deposited dose Tri- | 0.450 | 0.034 | 0.033 |
| SM6.1-αvβ6-AD09151) | | | |
| Group 5 (0.47 mg/kg deposited dose Tri- | 0.345 | 0.038 | 0.043 |
| SM6.1-αvβ6-AD09151) | | | |

TABLE 52
Average Relative Cynomolgus Monkey RAGE mRNA Expression, Right
Proximal Caudal Hilar Lobe, at Sacrifice in Example 12.

| | Average Relative | | |
|---|---|---|---|
| | cAGER mRNA | Low | High |
| Group ID | Expression (n = 3) | (error) | (error) |
| Group 1 (isotonic saline) | 1.000 | 0.083 | 0.090 |
| Group 2 (0.13 mg/kg deposited dose Tri- | 0.419 | 0.074 | 0.090 |
| SM6.1-αvβ6-AD09151) | | | |
| Group 3 (0.20 mg/kg deposited dose Tri- | 0.569 | 0.093 | 0.111 |
| SM6.1-αvβ6-AD09151) | | | |
| Group 4 (0.31 mg/kg deposited dose Tri- | 0.273 | 0.056 | 0.078 |
| SM6.1-αvβ6-AD09151) | | | |
| Group 5 (0.47 mg/kg deposited dose Tri- | 0.308 | 0.080 | 0.108 |
| SM6.1-αvβ6-AD09151) | | | |

TABLE 53
Average Relative Cynomolgus Monkey RAGE mRNA Expression, Right
Distal Cranial Hilar Lobe, at Sacrifice in Example 12.

| | Average Relative | | |
|---|---|---|---|
| | cAGER mRNA | Low | High |
| Group ID | Expression (n = 3) | (error) | (error) |
| Group 1 (isotonic saline) | 1.000 | 0.074 | 0.080 |
| Group 2 (0.13 mg/kg deposited dose Tri- | 0.265 | 0.072 | 0.099 |
| SM6.1-αvβ6-AD09151) | | | |
| Group 3 (0.20 mg/kg deposited dose Tri- | 0.555 | 0.055 | 0.061 |
| SM6.1-αvβ6-AD09151) | | | |
| Group 4 (0.31 mg/kg deposited dose Tri- | 0.286 | 0.017 | 0.018 |
| SM6.1-αvβ6-AD09151) | | | |
| Group 5 (0.47 mg/kg deposited dose Tri- | 0.296 | 0.057 | 0.070 |
| SM6.1-αvβ6-AD09151) | | | |

TABLE 54
Average Relative Cynomolgus Monkey RAGE mRNA Expression, Right
Distal Middle Lobe, at Sacrifice in Example 12.

| | Average Relative | | |
|---|---|---|---|
| | cAGER mRNA | Low | High |
| Group ID | Expression (n = 3) | (error) | (error) |
| Group 1 (isotonic saline) | 1.000 | 0.053 | 0.056 |
| Group 2 (0.13 mg/kg deposited dose Tri- | 0.395 | 0.129 | 0.191 |
| SM6.1-αvβ6-AD09151) | | | |
| Group 3 (0.20 mg/kg deposited dose Tri- | 0.569 | 0.109 | 0.135 |
| SM6.1-αvβ6-AD09151) | | | |
| Group 4 (0.31 mg/kg deposited dose Tri- | 0.169 | 0.030 | 0.042 |
| SM6.1-αvβ6-AD09151) | | | |
| Group 5 (0.47 mg/kg deposited dose Tri- | 0.333 | 0.132 | 0.220 |
| SM6.1-αvβ6-AD09151) | | | |

TABLE 55
Average Relative Cynomolgus Monkey RAGE mRNA Expression, Right
Distal Caudal Lobe, at Sacrifice in Example 12.

| | Average Relative | | |
|---|---|---|---|
| | cAGER mRNA | Low | High |
| Group ID | Expression (n = 3) | (error) | (error) |
| Group 1 (isotonic saline) | 1.000 | 0.395 | 0.652 |
| Group 2 (0.13 mg/kg deposited dose Tri- | 0.567 | 0.070 | 0.080 |
| SM6.1-αvβ6-AD09151) | | | |
| Group 3 (0.20 mg/kg deposited dose Tri- | 0.713 | 0.096 | 0.111 |
| SM6.1-αvβ6-AD09151) | | | |
| Group 4 (0.31 mg/kg deposited dose Tri- | 0.442 | 0.133 | 0.204 |
| SM6.1-αvβ6-AD09151) | | | |
| Group 5 (0.47 mg/kg deposited dose Tri- | 0.285 | 0.084 | 0.120 |
| SM6.1-αvβ6-AD09151) | | | |

TABLE 56
Average Relative Cynomolgus Monkey RAGE mRNA Expression, Right
Proximal Cranial Hilar Lobe, at Sacrifice in Example 12.

| | Average Relative | | |
|---|---|---|---|
| | cAGER mRNA | Low | High |
| Group ID | Expression (n = 3) | (error) | (error) |
| Group 1 (isotonic saline) | 1.000 | 0.269 | 0.368 |
| Group 2 (0.13 mg/kg deposited dose Tri- | 0.451 | 0.127 | 0.176 |
| SM6.1-αvβ6-AD09151) | | | |
| Group 3 (0.20 mg/kg deposited dose Tri- | 0.513 | 0.134 | 0.181 |
| SM6.1-αvβ6-AD09151) | | | |
| Group 4 (0.31 mg/kg deposited dose Tri- | 0.355 | 0.053 | 0.062 |
| SM6.1-αvβ6-AD09151) | | | |
| Group 5 (0.47 mg/kg deposited dose Tri- | 0.307 | 0.106 | 0.161 |
| SM6.1-αvβ6-AD09151) | | | |

TABLE 57
Average Relative Cynomolgus Monkey RAGE mRNA Expression, Right
Medial Cranial Lobe, at Sacrifice in Example 12.

| | Average Relative | | |
|---|---|---|---|
| | cAGER mRNA | Low | High |
| Group ID | Expression (n = 3) | (error) | (error) |
| Group 1 (isotonic saline) | 1.000 | 0.082 | 0.090 |
| Group 2 (0.13 mg/kg deposited dose Tri- | 0.397 | 0.103 | 0.139 |
| SM6.1-αvβ6-AD09151) | | | |
| Group 3 (0.20 mg/kg deposited dose Tri- | 0.549 | 0.049 | 0.053 |
| SM6.1-αvβ6-AD09151) | | | |
| Group 4 (0.31 mg/kg deposited dose Tri- | 0.278 | 0.071 | 0.095 |
| SM6.1-αvβ6-AD09151) | | | |
| Group 5 (0.47 mg/kg deposited dose Tri- | 0.280 | 0.091 | 0.135 |
| SM6.1-αvβ6-AD09151) | | | |

TABLE 58
Average Relative Cynomolgus Monkey RAGE mRNA Expression, Right
Medial Middle Lobe, at Sacrifice in Example 12.

| | Average Relative | | |
|---|---|---|---|
| | cAGER mRNA | Low | High |
| Group ID | Expression (n = 3) | (error) | (error) |
| Group 1 (isotonic saline) | 1.000 | 0.058 | 0.061 |
| Group 2 (0.13 mg/kg deposited dose Tri- | 0.396 | 0.072 | 0.088 |
| SM6.1-αvβ6-AD09151) | | | |
| Group 3 (0.20 mg/kg deposited dose Tri- | 0.577 | 0.124 | 0.157 |
| SM6.1-αvβ6-AD09151) | | | |
| Group 4 (0.31 mg/kg deposited dose Tri- | 0.375 | 0.074 | 0.093 |
| SM6.1-αvβ6-AD09151) | | | |
| Group 5 (0.47 mg/kg deposited dose Tri- | 0.307 | 0.039 | 0.045 |
| SM6.1-αvβ6-AD09151) | | | |

TABLE 59
Average Relative Cynomolgus Monkey RAGE mRNA Expression, Right
Medial Caudal Lobe, at Sacrifice in Example 12.

| | Average Relative | | |
|---|---|---|---|
| | cAGER mRNA | Low | High |
| Group ID | Expression (n = 3) | (error) | (error) |
| Group 1 (isotonic saline) | 1.000 | 0.082 | 0.089 |
| Group 2 (0.13 mg/kg deposited | 0.408 | 0.122 | 0.174 |
| dose Tri-SM6.1-αvβ6-AD09151) | | | |
| Group 3 (0.20 mg/kg deposited | 0.507 | 0.052 | 0.058 |
| dose Tri-SM6.1-αvβ6-AD09151) | | | |
| Group 4 (0.31 mg/kg deposited | 0.280 | 0.036 | 0.046 |
| dose Tri-SM6.1-αvβ6-AD09151) | | | |
| Group 5 (0.47 mg/kg deposited | 0.283 | 0.048 | 0.058 |
| dose Tri-SM6.1-αvβ6-AD09151) | | | |

TABLE 60
Average Relative Cynomolgus Monkey RAGE mRNA Expression, Right
Distal Cranial Lobe, at Sacrifice in Example 12.

| | Average Relative | | |
|---|---|---|---|
| | cAGER mRNA | Low | High |
| Group ID | Expression (n = 3) | (error) | (error) |
| Group 1 (isotonic saline) | 1.000 | 0.088 | 0.096 |
| Group 2 (0.13 mg/kg deposited | 0.351 | 0.066 | 0.082 |
| dose Tri-SM6.1-αvβ6-AD09151) | | | |
| Group 3 (0.20 mg/kg deposited | 0.509 | 0.077 | 0.090 |
| dose Tri-SM6.1-αvβ6-AD09151) | | | |
| Group 4 (0.31 mg/kg deposited | 0.316 | 0.064 | 0.081 |
| dose Tri-SM6.1-αvβ6-AD09151) | | | |
| Group 5 (0.47 mg/kg deposited | 0.311 | 0.085 | 0.117 |
| dose Tri-SM6.1-αvβ6-AD09151) | | | |

TABLE 61
Average Relative Cynomolgus Monkey RAGE mRNA Expression, Right
Distal Middle Lobe, at Sacrifice in Example 12.

| | Average Relative | | |
|---|---|---|---|
| | cAGER mRNA | Low | High |
| Group ID | Expression (n = 3) | (error) | (error) |
| Group 1 (isotonic saline) | 1.000 | 0.227 | 0.294 |
| Group 2 (0.13 mg/kg deposited | 0.195 | 0.086 | 0.154 |
| dose Tri-SM6.1-αvβ6-AD09151) | | | |
| Group 3 (0.20 mg/kg deposited | 0.429 | 0.119 | 0.165 |
| dose Tri-SM6.1-αvβ6-AD09151) | | | |
| Group 4 (0.31 mg/kg deposited | 0.289 | 0.028 | 0.040 |
| dose Tri-SM6.1-αvβ6-AD09151) | | | |
| Group 5 (0.47 mg/kg deposited | 0.242 | 0.069 | 0.096 |
| dose Tri-SM6.1-αvβ6-AD09151) | | | |

TABLE 62
Average Relative Cynomolgus Monkey RAGE mRNA Expression, Right
Distal Caudal Lobe, at Sacrifice in Example 12.

| | Average Relative | | |
|---|---|---|---|
| | cAGER mRNA | Low | High |
| Group ID | Expression (n = 3) | (error) | (error) |
| Group 1 (isotonic saline) | 1.000 | 0.077 | 0.083 |
| Group 2 (0.13 mg/kg deposited | 0.434 | 0.114 | 0.155 |
| dose Tri-SM6.1-αvβ6-AD09151) | | | |
| Group 3 (0.20 mg/kg deposited | 0.554 | 0.131 | 0.171 |
| dose Tri-SM6.1-αvβ6-AD09151) | | | |
| Group 4 (0.31 mg/kg deposited | 0.540 | 0.240 | 0.405 |
| dose Tri-SM6.1-αvβ6-AD09151) | | | |
| Group 5 (0.47 mg/kg deposited | 0.314 | 0.087 | 0.121 |
| dose Tri-SM6.1-αvβ6-AD09151) | | | |

TABLE 63
Average Relative Cynomolgus Monkey RAGE mRNA Expression, Right
Medial Cranial Lobe, at Sacrifice in Example 12.

| | Average Relative | | |
|---|---|---|---|
| | cAGER mRNA | Low | High |
| Group ID | Expression (n = 3) | (error) | (error) |
| Group 1 (isotonic saline) | 1.000 | 0.131 | 0.151 |
| Group 2 (0.13 mg/kg deposited | 0.499 | 0.169 | 0.256 |
| dose Tri-SM6.1-αvβ6-AD09151) | | | |
| Group 3 (0.20 mg/kg deposited | 0.545 | 0.116 | 0.147 |
| dose Tri-SM6.1-αvβ6-AD09151) | | | |
| Group 4 (0.31 mg/kg deposited | 0.332 | 0.020 | 0.021 |
| dose Tri-SM6.1-αvβ6-AD09151) | | | |
| Group 5 (0.47 mg/kg deposited | 0.360 | 0.100 | 0.138 |
| dose Tri-SM6.1-αvβ6-AD09151) | | | |

TABLE 64
Average Relative Cynomolgus Monkey RAGE mRNA Expression, Right
Medial Middle Lobe, at Sacrifice in Example 12.

| | Average Relative | | |
|---|---|---|---|
| | cAGER mRNA | Low | High |
| Group ID | Expression (n = 3) | (error) | (error) |
| Group 1 (isotonic saline) | 1.000 | 0.071 | 0.076 |
| Group 2 (0.13 mg/kg deposited | 0.571 | 0.130 | 0.169 |
| dose Tri-SM6.1-αvβ6-AD09151) | | | |
| Group 3 (0.20 mg/kg deposited | 0.708 | 0.131 | 0.161 |
| dose Tri-SM6.1-αvβ6-AD09151) | | | |
| Group 4 (0.31 mg/kg deposited | 0.306 | 0.035 | 0.039 |
| dose Tri-SM6.1-αvβ6-AD09151) | | | |
| Group 5 (0.47 mg/kg deposited | 0.258 | 0.074 | 0.103 |
| dose Tri-SM6.1-αvβ6-AD09151) | | | |

TABLE 65
Average Relative Cynomolgus Monkey RAGE mRNA Expression, Right
Medial Caudal Lobe, at Sacrifice in Example 12.

| | Average Relative | | |
|---|---|---|---|
| | cAGER mRNA | Low | High |
| Group ID | Expression (n = 3) | (error) | (error) |
| Group 1 (isotonic saline) | 1.000 | 0.180 | 0.219 |
| Group 2 (0.13 mg/kg deposited | 0.381 | 0.080 | 0.101 |
| dose Tri-SM6.1-αvβ6-AD09151) | | | |
| Group 3 (0.20 mg/kg deposited | 0.580 | 0.109 | 0.135 |
| dose Tri-SM6.1-αvβ6-AD09151) | | | |
| Group 4 (0.31 mg/kg deposited | 0.304 | 0.041 | 0.052 |
| dose Tri-SM6.1-αvβ6-AD09151) | | | |
| Group 5 (0.47 mg/kg deposited | 0.235 | 0.039 | 0.046 |
| dose Tri-SM6.1-αvβ6-AD09151) | | | |

TABLE 66
Average Relative Cynomolgus Monkey RAGE mRNA Expression, Right
Proximal Cranial Hilar Lobe, at Sacrifice in Example 12.

| | Average Relative | | |
|---|---|---|---|
| | cAGER mRNA | Low | High |
| Group ID | Expression (n = 3) | (error) | (error) |
| Group 1 (isotonic saline) | 1.000 | 0.153 | 0.180 |
| Group 2 (0.13 mg/kg deposited | 0.492 | 0.152 | 0.220 |
| dose Tri-SM6.1-αvβ6-AD09151) | | | |
| Group 3 (0.20 mg/kg deposited | 0.486 | 0.115 | 0.151 |
| dose Tri-SM6.1-αvβ6-AD09151) | | | |
| Group 4 (0.31 mg/kg deposited | 0.265 | 0.026 | 0.029 |
| dose Tri-SM6.1-αvβ6-AD09151) | | | |
| Group 5 (0.47 mg/kg deposited | 0.272 | 0.053 | 0.065 |
| dose Tri-SM6.1-αvβ6-AD09151) | | | |

TABLE 67
Average Relative Cynomolgus Monkey RAGE mRNA Expression, Right
Proximal Middle Hilar Lobe, at Sacrifice in Example 12.

| | Average Relative | | |
|---|---|---|---|
| | cAGER mRNA | Low | High |
| Group ID | Expression (n = 3) | (error) | (error) |
| Group 1 (isotonic saline) | 1.000 | 0.124 | 0.141 |
| Group 2 (0.13 mg/kg deposited | 0.537 | 0.121 | 0.157 |
| dose Tri-SM6.1-αvβ6-AD09151) | | | |
| Group 3 (0.20 mg/kg deposited | 0.509 | 0.156 | 0.226 |
| dose Tri-SM6.1-αvβ6-AD09151) | | | |
| Group 4 (0.31 mg/kg deposited | 0.247 | 0.064 | 0.077 |
| dose Tri-SM6.1-αvβ6-AD09151) | | | |
| Group 5 (0.47 mg/kg deposited | 0.322 | 0.090 | 0.125 |
| dose Tri-SM6.1-αvβ6-AD09151) | | | |

TABLE 68
Average Relative Cynomolgus Monkey RAGE mRNA Expression, Right
Proximal Caudal Hilar Lobe, at Sacrifice in Example 12.

| | Average Relative | | |
|---|---|---|---|
| | cAGER mRNA | Low | High |
| Group ID | Expression (n = 3) | (error) | (error) |
| Group 1 (isotonic saline) | 1.000 | 0.088 | 0.097 |
| Group 2 (0.13 mg/kg deposited | 0.310 | 0.067 | 0.086 |
| dose Tri-SM6.1-αvβ6-AD09151) | | | |
| Group 3 (0.20 mg/kg deposited | 0.502 | 0.105 | 0.133 |
| dose Tri-SM6.1-αvβ6-AD09151) | | | |
| Group 4 (0.31 mg/kg deposited | 0.248 | 0.043 | 0.054 |
| dose Tri-SM6.1-αvβ6-AD09151) | | | |
| Group 5 (0.47 mg/kg deposited | 0.219 | 0.050 | 0.065 |
| dose Tri-SM6.1-αvβ6-AD09151) | | | |

TABLE 69
Average Relative Cynomolgus Monkey RAGE mRNA Expression, Right
Medial Caudal Lobe, at Sacrifice in Example 12.

| | Average Relative | | |
|---|---|---|---|
| | cAGER mRNA | Low | High |
| Group ID | Expression (n = 3) | (error) | (error) |
| Group 1 (isotonic saline) | 1.000 | 0.112 | 0.126 |
| Group 2 (0.13 mg/kg deposited | 0.422 | 0.097 | 0.127 |
| dose Tri-SM6.1-αvβ6-AD09151) | | | |
| Group 3 (0.20 mg/kg deposited | 0.492 | 0.049 | 0.054 |
| dose Tri-SM6.1-αvβ6-AD09151) | | | |
| Group 4 (0.31 mg/kg deposited | 0.222 | 0.018 | 0.019 |
| dose Tri-SM6.1-αvβ6-AD09151) | | | |
| Group 5 (0.47 mg/kg deposited | 0.221 | 0.088 | 0.147 |
| dose Tri-SM6.1-αvβ6-AD09151) | | | |

TABLE 70
Average Relative Cynomolgus Monkey RAGE mRNA Expression, Right
Medial Middle Lobe, at Sacrifice in Example 12.

| | Average Relative | | |
|---|---|---|---|
| | cAGER mRNA | Low | High |
| Group ID | Expression (n = 3) | (error) | (error) |
| Group 1 (isotonic saline) | 1.000 | 0.086 | 0.094 |
| Group 2 (0.13 mg/kg deposited | 0.434 | 0.144 | 0.216 |
| dose Tri-SM6.1-αvβ6-AD09151) | | | |
| Group 3 (0.20 mg/kg deposited | 0.693 | 0.134 | 0.167 |
| dose Tri-SM6.1-αvβ6-AD09151) | | | |
| Group 4 (0.31 mg/kg deposited | 0.291 | 0.057 | 0.065 |
| dose Tri-SM6.1-αvβ6-AD09151) | | | |
| Group 5 (0.47 mg/kg deposited | 0.277 | 0.064 | 0.084 |
| dose Tri-SM6.1-αvβ6-AD09151) | | | |

TABLE 71
Average Relative Cynomolgus Monkey RAGE mRNA Expression, Right
Medial Caudal Lobe, at Sacrifice in Example 12.

| | Average Relative | | |
|---|---|---|---|
| | cAGER mRNA | Low | High |
| Group ID | Expression (n = 3) | (error) | (error) |
| Group 1 (isotonic saline) | 1.000 | 0.159 | 0.189 |
| Group 2 (0.13 mg/kg deposited | 0.338 | 0.080 | 0.106 |
| dose Tri-SM6.1-αvβ6-AD09151) | | | |
| Group 3 (0.20 mg/kg deposited | 0.438 | 0.058 | 0.067 |
| dose Tri-SM6.1-αvβ6-AD09151) | | | |
| Group 4 (0.31 mg/kg deposited | 0.297 | 0.090 | 0.113 |
| dose Tri-SM6.1-αvβ6-AD09151) | | | |
| Group 5 (0.47 mg/kg deposited | 0.215 | 0.072 | 0.108 |
| dose Tri-SM6.1-αvβ6-AD09151) | | | |

[0462] As shown in the data in Tables 47 through 71 above, RNAi agent AD09151 showed substantial inhibition (>70% inhibition observed with single inhaled dose at 0.31 mg/kg and 0.47 mg/kg) compared to control, demonstrating the ability to robustly silence AGER expression in non-human primates.

[0463] Tissue RAGE protein was analyzed via Western Blot. Pulverized lung tissue aliquot, based on availability of tissues, which included caudal distal lung tissue, and middle lobe tissue, was homogenized in radioimmunoprecipitation assay buffer (RIPA) using Qiagen bead-based homogenizer. Protein concentration was determined via bicinchoninic acid assay (BCA assay). The samples were prepared in Laemelli buffer and boiled. The gel was loaded with 10 μg total protein, and semi-dry transferred into a polyvinylidene difluoride (PVDF) membrane. The blot was assayed via Pierce Fast-western kit (30 min. primary antibody (ab216329) 1:1000 in proprietary blocking buffer, 15 min. HRP, 3×5 min. washes, 5 min. detection substrate West Pico). The resulting blot was imaged on iBright for RAGE and total protein stain, with the membrane treated with total protein normalization reagent. Densitometry of both bands of interest and for total protein minus background signal was quantified using iBright software.

[0464] Dose response of cynomolgus monkeys after administration of RAGE RNAi agent shows progressively higher RAGE protein inhibition in higher RAGE RNAi agent dose concentrations. This can be seen in both the middle and caudal lobes, with up to ~80-88% RAGE protein inhibition at 0.47 mg/kg.

[0465] Serum samples from cynomolgus monkeys at Day 15 and 29 after dosing with RAGE RNAi agent were collected, and Serum sRAGE levels were quantified via Gyros Protein Technologies assay. The following Table 72 shows the serum sRAGE levels at Day 15, normalized to baseline, along with standard deviation. The following Table 73 shows the serum sRAGE levels at Day 29, normalized to baseline, along with standard deviation.

TABLE 72
Serum sRAGE levels of cynomolgus monkeys after exposure to
RAGE RNAi agent, Day 15.

| | | Serum | |
|---|---|---|---|
| | | sRAGE | Standard |
| Group ID | Dose | (% BSL) | Deviation |
| Group 1 (isotonic saline) | N/A | 92.710 | 0.014 |
| Group 2 Tri-SM6.1-αvβ6-AD09151 | 0.13 mg/kg | 63.293 | 16.806 |
| Group 3 Tri-SM6.1-αvβ6-AD09151 | 0.20 mg/kg | 57.873 | 7.367 |
| Group 4 Tri-SM6.1-αvβ6-AD09151 | 0.31 mg/kg | 47.710 | 15.971 |
| Group 5 Tri-SM6.1-αvβ6-AD09151 | 0.47 mg/kg | 43.377 | 4.487 |

TABLE 73
Serum sRAGE levels of cynomolgus monkeys after exposure to
RAGE RNAi agent, Day 29.

| | | Serum | |
|---|---|---|---|
| | | sRAGE | Standard |
| Group ID | Dose | (% BSL) | Deviation |
| Group 1 (isotonic saline) | N/A | 100.470 | 28.206 |
| Group 2 Tri-SM6.1-αvβ6-AD09151 | 0.13 mg/kg | 79.750 | 17.336 |
| Group 3 Tri-SM6.1-αvβ6-AD09151 | 0.20 mg/kg | 66.523 | 5.243 |
| Group 4 Tri-SM6.1-αvβ6-AD09151 | 0.31 mg/kg | 46.873 | 25.249 |
| Group 5 Tri-SM6.1-αvβ6-AD09151 | 0.47 mg/kg | 39.833 | 13.811 |

[0466] After dosing with RAGE RNAi agents, cynomolgus monkeys showed significantly reduced serum sRAGE levels, compared to baseline levels. As shown in Tables 72 and 73, the dose response showed progressively more reduced sRAGE levels (higher sRAGE inhibition) at higher RAGE RNAi agent dosing concentrations, showing up to ~39-43% serum sRAGE levels (~57-61% inhibition) at Days 15 and 29 after exposure to RAGE RNAi agent.

### OTHER EMBODIMENTS

[0467] It is to be understood that while the invention has been described in conjunction with the detailed description thereof, the foregoing description is intended to illustrate and not limit the scope of the invention, which is defined by the scope of the appended claims. Other aspects, advantages, and modifications are within the scope of the following claims.

1. An RNAi agent for inhibiting expression of a Receptor for Advanced Glycation End-products gene, comprising:
an antisense strand comprising at least 17 contiguous nucleotides differing by 0 or 1 nucleotides from any one of the sequences provided in Table 2 or Table 3; and
a sense strand comprising a nucleotide sequence that is at least partially complementary to the antisense strand.

2.-3. (canceled)

4. The RNAi agent of claim 1, wherein at least one nucleotide of the RNAi agent is a modified nucleotide or includes a modified internucleoside linkage.

5. (canceled)

6. The RNAi agent of claim 4, wherein the modified nucleotide is selected from the group consisting of: 2′-O-methyl nucleotide, 2′-fluoro nucleotide, 2′-deoxy nucleotide, 2′,3′-seco nucleotide mimic, locked nucleotide, 2′-F-arabino nucleotide, 2′-methoxyethyl nucleotide, abasic nucleotide, ribitol, inverted nucleotide, inverted 2′-O-methyl nucleotide, inverted 2′-deoxy nucleotide, 2′-amino-modified nucleotide, 2′-alkyl-modified nucleotide, morpholino nucleotide, vinyl phosphonate-containing nucleotide, cyclopropyl phosphonate-containing nucleotide, and 3′-O-methyl nucleotide.

7.-10. (canceled)

11. The RNAi agent of claim 1, wherein the sense strand is between 18 and 30 nucleotides in length, and the antisense strand is between 18 and 30 nucleotides in length.

12.-16. (canceled)

17. The RNAi agent of claim 1, wherein the sense strand comprises one or two inverted abasic residues.

18. The RNAi agent of claim 1, wherein the RNAi agent is comprised of a sense strand and an antisense strand that form a duplex having the structure of any one of the duplexes in Table 7A, Table 7B, Table 8, Table 9A, Table 9B, or Table 10.

19. (canceled)

20. The RNAi agent of claim 1, comprising an antisense strand that consists of, consists essentially of, or comprises a nucleotide sequence that differs by 0 or 1 nucleotides from one of the following nucleotide sequences (5′→3′):
(SEQ ID NO: 55)
UUGUGUUCAGUUUCCAUUC;
(SEQ ID NO: 65)
UGAUGUUUUGAGCACCUAC;
(SEQ ID NO: 73)
UUCCAUUCCUGUUCAUUGC;
(SEQ ID NO: 7)
UUGUGUUCAGUUUCCAUUCCG;
(SEQ ID NO: 9)
UGAUGUUUUGAGCACCUACUC;
or
(SEQ ID NO: 8)
UUCCAUUCCUGUUCAUUGCCU.

21. The RNAi agent of claim 20, wherein the sense strand consists of, consists essentially of, or comprises a nucleotide sequence that differs by 0 or 1 nucleotides from one of the following nucleotide sequences (5′→3′):
(SEQ ID NO: 298)
GAAUGGAAACUGAACACAA;
(SEQ ID NO: 308)
GUAGGUGCUCAAAACAUCA;
(SEQ ID NO: 316)
GCAAUGAACAGGAAUIGAA;
(SEQ ID NO: 19)
CGGAAUGGAAACUGAACACAA;
(SEQ ID NO: 20)
GAGUAGGUGCUCAAAACAUCA;
or
(SEQ ID NO: 21)
AGGCAAUGAACAGGAAUIGAA.

22. (canceled)

23. The RNAi agent of claim 1, comprising an antisense strand that comprises, consists of, or consists essentially of a modified nucleotide sequence that differs by 0 or 1 nucleotides from one of the following nucleotide sequences (5′→3′):
(SEQ ID NO: 2)
usUfsgsUfgUfuCfaGfuUfuCfcAfuUfcCfsg;
(SEQ ID NO: 3)
cPrpusUfsgsUfgUfuCfaGfuUfuCfcAfuUfcCfsg;
(SEQ ID NO: 5)
usGfsasuguuuugaGfcAfcCfuacusc;
(SEQ ID NO: 6)
cPrpusGfsasuguuuugaGfcAfcCfuacusc;
(SEQ ID NO: 4)
usUfscsCfaUfuCfcUfgUfuCfaUfuGfcCfsu;
wherein a represents 2′-O-methyl adenosine, c represents 2′-O-methyl cytidine, g represents 2′-O-methyl guanosine, u represents 2′-O-methyl uridine; Af represents 2′-fluoro adenosine, Cf represents 2′-fluoro cytidine, Gf represents 2′-fluoro guanosine, Uf represents 2′-fluoro uridine; cPrpu represents 5′-cyclopropyl phosphonate-2′-O-methyl uridine; s represents a phosphorothioate linkage; and wherein all or substantially all of the nucleotides on the sense strand are modified nucleotides.

24. The RNAi agent of claim 1, wherein the sense strand comprises, consists of, or consists essentially of a modified nucleotide sequence that differs by 0 or 1 nucleotides from one of the following nucleotide sequences (5′→3′):
(SEQ ID NO: 14)
gsaguagGfuGfcUfcaaaacauca;
(SEQ ID NO: 15)
asggcaaugAfAfCfaggaauigaa;
(SEQ ID NO: 13)
csggaauggAfAfAfcugaacacaa;
wherein a represents 2′-O-methyl adenosine, c represents 2′-O-methyl cytidine, g represents 2′-O-methyl guanosine, i represents 2′-O-methyl inosine, u represents 2′-O-methyl uridine; Af represents 2′-fluoro adenosine, Cf represents 2′-fluoro cytidine, Gf represents 2′-fluoro guanosine, Uf represents 2′-fluoro uridine; and s represents a phosphorothioate linkage; and wherein all or substantially all of the nucleotides on the antisense strand are modified nucleotides.

25. (canceled)

26. The RNAi agent of claim 1, wherein the RNAi agent is linked to a targeting ligand.

27.-29. (canceled)

30. The RNAi agent of claim 26, wherein the targeting ligand comprises the structure: [chemical structure]
or a pharmaceutically acceptable salt thereof, or [chemical structure]
or a pharmaceutically acceptable salt thereof,
wherein [symbol] indicates the point of connection to the RNAi agent.

31. The RNAi agent of claim 26, wherein the targeting ligand has a structure selected from the group consisting of: [chemical structure] [chemical structure] [chemical structure] [chemical structure] [chemical structure] [chemical structure] [chemical structure] [chemical structure] [chemical structure]
wherein [symbol] indicates the point of connection to the RNAi agent.

32. The RNAi agent of claim 31, wherein RNAi agent is conjugated to a targeting ligand having the following structure: [chemical structure]
wherein [symbol] indicates the point of connection to the RNAi agent.

33.-36. (canceled)

37. A composition comprising the RNAi agent of claim 1, wherein the composition further comprises a pharmaceutically acceptable excipient.

38.-44. (canceled)

45. A method for inhibiting expression of a Receptor for Advanced Glycation End-products gene in a cell, the method comprising introducing into a cell an effective amount of an RNAi agent of claim 1.

46. The method of claim 45, wherein the cell is within a subject.

47.-48. (canceled)

49. A method of treating one or more symptoms or diseases associated with enhanced or elevated membrane RAGE activity levels, the method comprising administering to a human subject in need thereof a therapeutically effective amount of the composition of claim 37.

50. The method of claim 49, wherein the disease is a respiratory disease.

51.-61. (canceled)

62. A method of making an RNAi agent of claim 1, comprising annealing a sense strand and an antisense strand to form a double-stranded ribonucleic acid molecule.

63.-64. (canceled)

The application's sequence listing, which the Patent Office published only in electronic form, follows.

SEQUENCE LISTING (891 sequences)

SEQ ID NO: 1 - RNA, 1420 nt, Homo sapiens
  source 1..1420: mol_type = mRNA
agacagagccaggaccctggaaggaagcaggatggctgccggaacagcagttggagcctgggtgctggtcctcagtctgtggggggcagtagtaggtgctcaaaacatcacagcccggattggcgagccactggtgctgaagtgtaagggggcccccaagaaaccaccccagcggctggaatggaaactgaacacaggccggacagaagcttggaaggtcctgtctccccagggaggaggcccctgggacagtgtggctcgtgtccttcccaacggctccctcttccttccggctgtcgggatccaggatgaggggattttccggtgccaggcaatgaacaggaatggaaaggagaccaagtccaactaccgagtccgtgtctaccagattcctgggaagccagaaattgtagattctgcctctgaactcacggctggtgttcccaataaggtggggacatgtgtgtcagagggaagctaccctgcagggactcttagctggcacttggatgggaagcccctggtgcctaatgagaagggagtatctgtgaaggaacagaccaggagacaccctgagacagggctcttcacactgcagtcggagctaatggtgaccccagcccggggaggagatccccgtcccaccttctcctgtagcttcagcccaggccttccccgacaccgggccttgcgcacagcccccatccagccccgtgtctgggagcctgtgcctctggaggaggtccaattggtggtggagccagaaggtggagcagtagctcctggtggaaccgtaaccctgacctgtgaagtccctgcccagccctctcctcaaatccactggatgaaggatggtgtgcccttgccccttccccccagccctgtgctgatcctccctgagatagggcctcaggaccagggaacctacagctgtgtggccacccattccagccacgggccccaggaaagccgtgctgtcagcatcagcatcatcgaaccaggcgaggaggggccaactgcaggctctgtgggaggatcagggctgggaactctagccctggccctggggatcctgggaggcctggggacagccgccctgctcattggggtcatcttgtggcaaaggcggcaacgccgaggagaggagaggaaggccccagaaaaccaggaggaagaggaggagcgtgcagaactgaatcagtcggaggaacctgaggcaggcgagagtagtactggagggccttgaggggcccacagacagatcccatccatcagctcccttttctttttcccttgaactgttctggcctcagaccaactctctcctgtataatctctctcctgtataaccccaccttgccaagctttcttctacaaccagagccccccacaatgatgattaaacacctgacacatcttg

SEQ ID NO: 2 - RNA, 21 nt, synthetic construct
  modified_base 1: mod_base = um
  modified_base 1^2: mod_base = OTHER; note = phosphorothioate linkage
  modified_base 2: mod_base = OTHER; note = 2'-fluorouridine
  modified_base 2^3: mod_base = OTHER; note = phosphorothioate linkage
  modified_base 3: mod_base = gm
  modified_base 3^4: mod_base = OTHER; note = phosphorothioate linkage
  modified_base 4: mod_base = OTHER; note = 2'-fluorouridine
  modified_base 5: mod_base = gm
  modified_base 6: mod_base = OTHER; note = 2'-fluorouridine
  modified_base 7: mod_base = um
  modified_base 8: mod_base = OTHER; note = 2'-fluorocytidine
  modified_base 9: mod_base = OTHER; note = 2'-O-methyladenosine
  modified_base 10: mod_base = OTHER; note = 2'-fluoroguanosine
  modified_base 11: mod_base = um
  modified_base 12: mod_base = OTHER; note = 2'-fluorouridine
  modified_base 13: mod_base = um
  modified_base 14: mod_base = OTHER; note = 2'-fluorocytidine
  modified_base 15: mod_base = cm
  modified_base 16: mod_base = OTHER; note = 2'-fluoroadenosine
  modified_base 17: mod_base = um
  modified_base 18: mod_base = OTHER; note = 2'-fluorouridine
  modified_base 19: mod_base = cm
  modified_base 20: mod_base = OTHER; note = 2'-fluorocytidine
  modified_base 20^21: mod_base = OTHER; note = phosphorothioate linkage
  modified_base 21: mod_base = gm
  source 1..21: mol_type = other RNA
ttgtgttcagtttccattccg

SEQ ID NO: 3 - RNA, 21 nt, synthetic construct
  modified_base 1: mod_base = OTHER; note = 5 -cyclopropyl phosphonate-2 -O-methyluridine
  modified_base 1^2: mod_base = OTHER; note = phosphorothioate linkage
  modified_base 2: mod_base = OTHER; note = 2'-fluorouridine
  modified_base 2^3: mod_base = OTHER; note = phosphorothioate linkage
  modified_base 3: mod_base = gm
  modified_base 3^4: mod_base = OTHER; note = phosphorothioate linkage
  modified_base 4: mod_base = OTHER; note = 2'-fluorouridine
  modified_base 5: mod_base = gm
  modified_base 6: mod_base = OTHER; note = 2'-fluorouridine
  modified_base 7: mod_base = um
  modified_base 8: mod_base = OTHER; note = 2'-fluorocytidine
  modified_base 9: mod_base = OTHER; note = 2'-O-methyladenosine
  modified_base 10: mod_base = OTHER; note = 2'-fluoroguanosine
  modified_base 11: mod_base = um
  modified_base 12: mod_base = OTHER; note = 2'-fluorouridine
  modified_base 13: mod_base = um
  modified_base 14: mod_base = OTHER; note = 2'-fluorocytidine
  modified_base 15: mod_base = cm
  modified_base 16: mod_base = OTHER; note = 2'-fluoroadenosine
  modified_base 17: mod_base = um
  modified_base 18: mod_base = OTHER; note = 2'-fluorouridine
  modified_base 19: mod_base = cm
  modified_base 20: mod_base = OTHER; note = 2'-fluorocytidine
  modified_base 20^21: mod_base = OTHER; note = phosphorothioate linkage
  modified_base 21: mod_base = gm
  source 1..21: mol_type = other RNA
ttgtgttcagtttccattccg

SEQ ID NO: 4 - RNA, 21 nt, synthetic construct
  modified_base 1: mod_base = um
  modified_base 1^2: mod_base = OTHER; note = phosphorothioate linkage
  modified_base 2: mod_base = OTHER; note = 2'-fluorouridine
  modified_base 2^3: mod_base = OTHER; note = phosphorothioate linkage
  modified_base 3: mod_base = cm
  modified_base 3^4: mod_base = OTHER; note = phosphorothioate linkage
  modified_base 4: mod_base = OTHER; note = 2'-fluorocytidine
  modified_base 5: mod_base = OTHER; note = 2'-O-methyladenosine
  modified_base 6: mod_base = OTHER; note = 2'-fluorouridine
  modified_base 7: mod_base = um
  modified_base 8: mod_base = OTHER; note = 2'-fluorocytidine
  modified_base 9: mod_base = cm
  modified_base 10: mod_base = OTHER; note = 2'-fluorouridine
  modified_base 11: mod_base = gm
  modified_base 12: mod_base = OTHER; note = 2'-fluorouridine
  modified_base 13: mod_base = um
  modified_base 14: mod_base = OTHER; note = 2'-fluorocytidine
  modified_base 15: mod_base = OTHER; note = 2'-O-methyladenosine
  modified_base 16: mod_base = OTHER; note = 2'-fluorouridine
  modified_base 17: mod_base = um
  modified_base 18: mod_base = OTHER; note = 2'-fluoroguanosine
  modified_base 19: mod_base = cm
  modified_base 20: mod_base = OTHER; note = 2'-fluorocytidine
  modified_base 20^21: mod_base = OTHER; note = phosphorothioate linkage
  modified_base 21: mod_base = um
  source 1..21: mol_type = other RNA
ttccattcctgttcattgcct

SEQ ID NO: 5 - RNA, 21 nt, synthetic construct
  modified_base 1: mod_base = um
  modified_base 1^2: mod_base = OTHER; note = phosphorothioate linkage
  modified_base 2: mod_base = OTHER; note = 2'-fluoroguanosine
  modified_base 2^3: mod_base = OTHER; note = phosphorothioate linkage
  modified_base 3: mod_base = OTHER; note = 2'-O-methyladenosine
  modified_base 3^4: mod_base = OTHER; note = phosphorothioate linkage
  modified_base 4: mod_base = um
  modified_base 5: mod_base = gm
  modified_base 6: mod_base = um
  modified_base 7: mod_base = um
  modified_base 8: mod_base = um
  modified_base 9: mod_base = um
  modified_base 10: mod_base = gm
  modified_base 11: mod_base = OTHER; note = 2'-O-methyladenosine
  modified_base 12: mod_base = OTHER; note = 2'-fluoroguanosine
  modified_base 13: mod_base = cm
  modified_base 14: mod_base = OTHER; note = 2'-fluoroadenosine
  modified_base 15: mod_base = cm
  modified_base 16: mod_base = OTHER; note = 2'-fluorocytidine
  modified_base 17: mod_base = um
  modified_base 18: mod_base = OTHER; note = 2'-O-methyladenosine
  modified_base 19: mod_base = cm
  modified_base 20: mod_base = um
  modified_base 20^21: mod_base = OTHER; note = phosphorothioate linkage
  modified_base 21: mod_base = cm
  source 1..21: mol_type = other RNA
tgatgttttgagcacctactc

SEQ ID NO: 6 - RNA, 21 nt, synthetic construct
  modified_base 1: mod_base = OTHER; note = 5 -cyclopropyl phosphonate-2 -O-methyluridine
  modified_base 1^2: mod_base = OTHER; note = phosphorothioate linkage
  modified_base 2: mod_base = OTHER; note = 2'-fluoroguanosine
  modified_base 2^3: mod_base = OTHER; note = phosphorothioate linkage
  modified_base 3: mod_base = OTHER; note = 2'-O-methyladenosine
  modified_base 3^4: mod_base = OTHER; note = phosphorothioate linkage
  modified_base 4: mod_base = um
  modified_base 5: mod_base = gm
  modified_base 6: mod_base = um
  modified_base 7: mod_base = um
  modified_base 8: mod_base = um
  modified_base 9: mod_base = um
  modified_base 10: mod_base = gm
  modified_base 11: mod_base = OTHER; note = 2'-O-methyladenosine
  modified_base 12: mod_base = OTHER; note = 2'-fluoroguanosine
  modified_base 13: mod_base = cm
  modified_base 14: mod_base = OTHER; note = 2'-fluoroadenosine
  modified_base 15: mod_base = cm
  modified_base 16: mod_base = OTHER; note = 2'-fluorocytidine
  modified_base 17: mod_base = um
  modified_base 18: mod_base = OTHER; note = 2'-O-methyladenosine
  modified_base 19: mod_base = cm
  modified_base 20: mod_base = um
  modified_base 20^21: mod_base = OTHER; note = phosphorothioate linkage
  modified_base 21: mod_base = cm
  source 1..21: mol_type = other RNA
tgatgttttgagcacctactc

SEQ ID NO: 7 - RNA, 21 nt, synthetic construct
  source 1..21: mol_type = other RNA
ttgtgttcagtttccattccg

SEQ ID NO: 8 - RNA, 21 nt, synthetic construct
  source 1..21: mol_type = other RNA
ttccattcctgttcattgcct

SEQ ID NO: 9 - RNA, 21 nt, synthetic construct
  source 1..21: mol_type = other RNA
tgatgttttgagcacctactc

SEQ ID NO: 10 - RNA, 21 nt, synthetic construct
  modified_base 1: mod_base = cm
  modified_base 1^2: mod_base = OTHER; note = phosphorothioate linkage
  modified_base 2: mod_base = gm
  modified_base 3: mod_base = gm
  modified_base 4: mod_base = OTHER; note = 2'-O-methyladenosine
  modified_base 5: mod_base = OTHER; note = 2'-O-methyladenosine
  modified_base 6: mod_base = um
  modified_base 7: mod_base = gm
  modified_base 8: mod_base = gm
  modified_base 9: mod_base = OTHER; note = 2'-fluoroadenosine
  modified_base 10: mod_base = OTHER; note = 2'-fluoroadenosine
  modified_base 11: mod_base = OTHER; note = 2'-fluoroadenosine
  modified_base 12: mod_base = cm
  modified_base 13: mod_base = um
  modified_base 14: mod_base = gm
  modified_base 15: mod_base = OTHER; note = 2'-O-methyladenosine
  modified_base 16: mod_base = OTHER; note = 2'-O-methyladenosine
  modified_base 17: mod_base = cm
  modified_base 18: mod_base = OTHER; note = 2'-O-methyladenosine
  modified_base 19: mod_base = cm
  modified_base 20: mod_base = OTHER; note = 2'-O-methyladenosine
  modified_base 21: mod_base = OTHER; note = 2'-O-methyladenosine
  source 1..21: mol_type = other RNA
cggaatggaaactgaacacaa

SEQ ID NO: 11 - RNA, 21 nt, synthetic construct
  modified_base 1: mod_base = gm
  modified_base 1^2: mod_base = OTHER; note = phosphorothioate linkage
  modified_base 2: mod_base = OTHER; note = 2'-O-methyladenosine
  modified_base 3: mod_base = gm
  modified_base 4: mod_base = um
  modified_base 5: mod_base = OTHER; note = 2'-O-methyladenosine
  modified_base 6: mod_base = gm
  modified_base 7: mod_base = OTHER; note = 2'-fluoroguanosine
  modified_base 8: mod_base = um
  modified_base 9: mod_base = OTHER; note = 2'-fluoroguanosine
  modified_base 10: mod_base = cm
  modified_base 11: mod_base = OTHER; note = 2'-fluorouridine
  modified_base 12: mod_base = cm
  modified_base 13: mod_base = OTHER; note = 2'-O-methyladenosine
  modified_base 14: mod_base = OTHER; note = 2'-O-methyladenosine
  modified_base 15: mod_base = OTHER; note = 2'-O-methyladenosine
  modified_base 16: mod_base = OTHER; note = 2'-O-methyladenosine
  modified_base 17: mod_base = cm
  modified_base 18: mod_base = OTHER; note = 2'-O-methyladenosine
  modified_base 19: mod_base = um
  modified_base 20: mod_base = cm
  modified_base 21: mod_base = OTHER; note = 2'-O-methyladenosine
  source 1..21: mol_type = other RNA
gagtaggtgctcaaaacatca

SEQ ID NO: 12 - RNA, 21 nt, synthetic construct
  modified_base 1: mod_base = OTHER; note = 2'-O-methyladenosine
  modified_base 1^2: mod_base = OTHER; note = phosphorothioate linkage
  modified_base 2: mod_base = gm
  modified_base 3: mod_base = gm
  modified_base 4: mod_base = cm
  modified_base 5: mod_base = OTHER; note = 2'-O-methyladenosine
  modified_base 6: mod_base = OTHER; note = 2'-O-methyladenosine
  modified_base 7: mod_base = um
  modified_base 8: mod_base = gm
  modified_base 9: mod_base = OTHER; note = 2'-fluoroadenosine
  modified_base 10: mod_base = OTHER; note = 2'-fluoroadenosine
  modified_base 11: mod_base = OTHER; note = 2'-fluorocytidine
  modified_base 12: mod_base = OTHER; note = 2'-O-methyladenosine
  modified_base 13: mod_base = gm
  modified_base 14: mod_base = gm
  modified_base 15: mod_base = OTHER; note = 2'-O-methyladenosine
  modified_base 16: mod_base = OTHER; note = 2'-O-methyladenosine
  modified_base 17: mod_base = um
  modified_base 18: mod_base = i
  modified_base 19: mod_base = gm
  modified_base 20: mod_base = OTHER; note = 2'-O-methyladenosine
  modified_base 21: mod_base = OTHER; note = 2'-O-methyladenosine
  source 1..21: mol_type = other RNA
aggcaatgaacaggaatngaa

SEQ ID NO: 13 - RNA, 21 nt, synthetic construct
  modified_base 1: mod_base = cm
  modified_base 1^2: mod_base = OTHER; note = phosphorothioate linkage
  modified_base 2: mod_base = gm
  modified_base 3: mod_base = gm
  modified_base 4: mod_base = OTHER; note = 2'-O-methyladenosine
  modified_base 5: mod_base = OTHER; note = 2'-O-methyladenosine
  modified_base 6: mod_base = um
  modified_base 7: mod_base = gm
  modified_base 8: mod_base = gm
  modified_base 9: mod_base = OTHER; note = 2'-fluoroadenosine
  modified_base 10: mod_base = OTHER; note = 2'-fluoroadenosine
  modified_base 11: mod_base = OTHER; note = 2'-fluoroadenosine
  modified_base 12: mod_base = cm
  modified_base 13: mod_base = um
  modified_base 14: mod_base = gm
  modified_base 15: mod_base = OTHER; note = 2'-O-methyladenosine
  modified_base 16: mod_base = OTHER; note = 2'-O-methyladenosine
  modified_base 17: mod_base = cm
  modified_base 18: mod_base = OTHER; note = 2'-O-methyladenosine
  modified_base 19: mod_base = cm
  modified_base 20: mod_base = OTHER; note = 2'-O-methyladenosine
  modified_base 21: mod_base = OTHER; note = 2'-O-methyladenosine
  source 1..21: mol_type = other RNA
cggaatggaaactgaacacaa

SEQ ID NO: 14 - RNA, 21 nt, synthetic construct
  modified_base 1: mod_base = gm
  modified_base 1^2: mod_base = OTHER; note = phosphorothioate linkage
  modified_base 2: mod_base = OTHER; note = 2'-O-methyladenosine
  modified_base 3: mod_base = gm
  modified_base 4: mod_base = um
  modified_base 5: mod_base = OTHER; note = 2'-O-methyladenosine
  modified_base 6: mod_base = gm
  modified_base 7: mod_base = OTHER; note = 2'-fluoroguanosine
  modified_base 8: mod_base = um
  modified_base 9: mod_base = OTHER; note = 2'-fluoroguanosine
  modified_base 10: mod_base = cm
  modified_base 11: mod_base = OTHER; note = 2'-fluorouridine
  modified_base 12: mod_base = cm
  modified_base 13: mod_base = OTHER; note = 2'-O-methyladenosine
  modified_base 14: mod_base = OTHER; note = 2'-O-methyladenosine
  modified_base 15: mod_base = OTHER; note = 2'-O-methyladenosine
  modified_base 16: mod_base = OTHER; note = 2'-O-methyladenosine
  modified_base 17: mod_base = cm
  modified_base 18: mod_base = OTHER; note = 2'-O-methyladenosine
  modified_base 19: mod_base = um
  modified_base 20: mod_base = cm
  modified_base 21: mod_base = OTHER; note = 2'-O-methyladenosine
  source 1..21: mol_type = other RNA
gagtaggtgctcaaaacatca

SEQ ID NO: 15 - RNA, 21 nt, synthetic construct
  modified_base 1: mod_base = OTHER; note = 2'-O-methyladenosine
  modified_base 1^2: mod_base = OTHER; note = phosphorothioate linkage
  modified_base 2: mod_base = gm
  modified_base 3: mod_base = gm
  modified_base 4: mod_base = cm
  modified_base 5: mod_base = OTHER; note = 2'-O-methyladenosine
  modified_base 6: mod_base = OTHER; note = 2'-O-methyladenosine
  modified_base 7: mod_base = um
  modified_base 8: mod_base = gm
  modified_base 9: mod_base = OTHER; note = 2'-fluoroadenosine
  modified_base 10: mod_base = OTHER; note = 2'-fluoroadenosine
  modified_base 11: mod_base = OTHER; note = 2'-fluorocytidine
  modified_base 12: mod_base = OTHER; note = 2'-O-methyladenosine
  modified_base 13: mod_base = gm
  modified_base 14: mod_base = gm
  modified_base 15: mod_base = OTHER; note = 2'-O-methyladenosine
  modified_base 16: mod_base = OTHER; note = 2'-O-methyladenosine
  modified_base 17: mod_base = um
  modified_base 18: mod_base = i
  modified_base 19: mod_base = gm
  modified_base 20: mod_base = OTHER; note = 2'-O-methyladenosine
  modified_base 21: mod_base = OTHER; note = 2'-O-methyladenosine
  source 1..21: mol_type = other RNA
aggcaatgaacaggaatngaa

SEQ ID NO: 16 - RNA, 21 nt, synthetic construct
  modified_base 1: mod_base = cm
  modified_base 1^2: mod_base = OTHER; note = phosphorothioate linkage
  modified_base 2: mod_base = gm
  modified_base 3: mod_base = gm
  modified_base 4: mod_base = OTHER; note = 2'-O-methyladenosine
  modified_base 5: mod_base = OTHER; note = 2'-O-methyladenosine
  modified_base 6: mod_base = um
  modified_base 7: mod_base = gm
  modified_base 8: mod_base = gm
  modified_base 9: mod_base = OTHER; note = 2'-fluoroadenosine
  modified_base 10: mod_base = OTHER; note = 2'-fluoroadenosine
  modified_base 11: mod_base = OTHER; note = 2'-fluoroadenosine
  modified_base 12: mod_base = cm
  modified_base 13: mod_base = um
  modified_base 14: mod_base = gm
  modified_base 15: mod_base = OTHER; note = 2'-O-methyladenosine
  modified_base 16: mod_base = OTHER; note = 2'-O-methyladenosine
  modified_base 17: mod_base = cm
  modified_base 18: mod_base = OTHER; note = 2'-O-methyladenosine
  modified_base 19: mod_base = cm
  modified_base 20: mod_base = OTHER; note = 2'-O-methyladenosine
  modified_base 21: mod_base = OTHER; note = 2'-O-methyladenosine
  source 1..21: mol_type = other RNA
cggaatggaaactgaacacaa

SEQ ID NO: 17 - RNA, 21 nt, synthetic construct
  modified_base 1: mod_base = gm
  modified_base 1^2: mod_base = OTHER; note = phosphorothioate linkage
  modified_base 2: mod_base = OTHER; note = 2'-O-methyladenosine
  modified_base 3: mod_base = gm
  modified_base 4: mod_base = um
  modified_base 5: mod_base = OTHER; note = 2'-O-methyladenosine
  modified_base 6: mod_base = gm
  modified_base 7: mod_base = OTHER; note = 2'-fluoroguanosine
  modified_base 8: mod_base = um
  modified_base 9: mod_base = OTHER; note = 2'-fluoroguanosine
  modified_base 10: mod_base = cm
  modified_base 11: mod_base = OTHER; note = 2'-fluorouridine
  modified_base 12: mod_base = cm
  modified_base 13: mod_base = OTHER; note = 2'-O-methyladenosine
  modified_base 14: mod_base = OTHER; note = 2'-O-methyladenosine
  modified_base 15: mod_base = OTHER; note = 2'-O-methyladenosine
  modified_base 16: mod_base = OTHER; note = 2'-O-methyladenosine
  modified_base 17: mod_base = cm
  modified_base 18: mod_base = OTHER; note = 2'-O-methyladenosine
  modified_base 19: mod_base = um
  modified_base 20: mod_base = cm
  modified_base 21: mod_base = OTHER; note = 2'-O-methyladenosine
  source 1..21: mol_type = other RNA
gagtaggtgctcaaaacatca

SEQ ID NO: 18 - RNA, 21 nt, synthetic construct
  modified_base 1: mod_base = OTHER; note = 2'-O-methyladenosine
  modified_base 1^2: mod_base = OTHER; note = phosphorothioate linkage
  modified_base 2: mod_base = gm
  modified_base 3: mod_base = gm
  modified_base 4: mod_base = cm
  modified_base 5: mod_base = OTHER; note = 2'-O-methyladenosine
  modified_base 6: mod_base = OTHER; note = 2'-O-methyladenosine
  modified_base 7: mod_base = um
  modified_base 8: mod_base = gm
  modified_base 9: mod_base = OTHER; note = 2'-fluoroadenosine
  modified_base 10: mod_base = OTHER; note = 2'-fluoroadenosine
  modified_base 11: mod_base = OTHER; note = 2'-fluorocytidine
  modified_base 12: mod_base = OTHER; note = 2'-O-methyladenosine
  modified_base 13: mod_base = gm
  modified_base 14: mod_base = gm
  modified_base 15: mod_base = OTHER; note = 2'-O-methyladenosine
  modified_base 16: mod_base = OTHER; note = 2'-O-methyladenosine
  modified_base 17: mod_base = um
  modified_base 18: mod_base = i
  modified_base 19: mod_base = gm
  modified_base 20: mod_base = OTHER; note = 2'-O-methyladenosine
  modified_base 21: mod_base = OTHER; note = 2'-O-methyladenosine
  source 1..21: mol_type = other RNA
aggcaatgaacaggaatngaa

SEQ ID NO: 19 - RNA, 21 nt, synthetic construct
  source 1..21: mol_type = other RNA
cggaatggaaactgaacacaa

SEQ ID NO: 20 - RNA, 21 nt, synthetic construct
  source 1..21: mol_type = other RNA
gagtaggtgctcaaaacatca

SEQ ID NO: 21 - RNA, 21 nt, synthetic construct
  modified_base 18: mod_base = i
  source 1..21: mol_type = other RNA
aggcaatgaacaggaatngaa

SEQ ID NO: 22 - RNA, 19 nt, synthetic construct
  source 1..19: mol_type = other RNA
gaatggaaactgaacacag

SEQ ID NO: 23 - RNA, 19 nt, synthetic construct
  source 1..19: mol_type = other RNA
gtaggtgctcaaaacatca

SEQ ID NO: 24 - RNA, 19 nt, synthetic construct
  source 1..19: mol_type = other RNA
gcaatgaacaggaatggaa

SEQ ID NO: 25 - RNA, 19 nt, synthetic construct
  source 1..19: mol_type = other RNA
aatggaaactgaacacagg

SEQ ID NO: 26 - RNA, 19 nt, synthetic construct
  source 1..19: mol_type = other RNA
cagattcctgggaagccag

SEQ ID NO: 27 - RNA, 19 nt, synthetic construct
  source 1..19: mol_type = other RNA
ctgggaagccagaaattgt

SEQ ID NO: 28 - RNA, 19 nt, synthetic construct
  source 1..19: mol_type = other RNA
cactggtgctgaagtgtaa

SEQ ID NO: 29 - RNA, 19 nt, synthetic construct
  source 1..19: mol_type = other RNA
gacagaagcttggaaggtc

SEQ ID NO: 30 - RNA, 19 nt, synthetic construct
  source 1..19: mol_type = other RNA
ggatgaggggattttccgg

SEQ ID NO: 31 - RNA, 19 nt, synthetic construct
  source 1..19: mol_type = other RNA
attcctgggaagccagaaa

SEQ ID NO: 32 - RNA, 19 nt, synthetic construct
  source 1..19: mol_type = other RNA
attctgcctctgaactcac

SEQ ID NO: 33 - RNA, 19 nt, synthetic construct
  source 1..19: mol_type = other RNA
ccctgcagggactcttagc

SEQ ID NO: 34 - RNA, 19 nt, synthetic construct
  source 1..19: mol_type = other RNA
cctgcagggactcttagct

SEQ ID NO: 35 - RNA, 19 nt, synthetic construct
  source 1..19: mol_type = other RNA
ccaccttctcctgtagctt

SEQ ID NO: 36 - RNA, 19 nt, synthetic construct
  source 1..19: mol_type = other RNA
cttctcctgtagcttcagc

SEQ ID NO: 37 - RNA, 19 nt, synthetic construct
  source 1..19: mol_type = other RNA
tgctggtcctcagtctgtg

SEQ ID NO: 38 - RNA, 19 nt, synthetic construct
  source 1..19: mol_type = other RNA
gctggtcctcagtctgtgg

SEQ ID NO: 39 - RNA, 19 nt, synthetic construct
  source 1..19: mol_type = other RNA
tccgtgtctaccagattcc

SEQ ID NO: 40 - RNA, 19 nt, synthetic construct
  source 1..19: mol_type = other RNA
cgtgtctaccagattcctg

SEQ ID NO: 41 - RNA, 19 nt, synthetic construct
  source 1..19: mol_type = other RNA
caccttctcctgtagcttc

SEQ ID NO: 42 - RNA, 19 nt, synthetic construct
  source 1..19: mol_type = other RNA
cctcaaatccactggatga

SEQ ID NO: 43 - RNA, 19 nt, synthetic construct
  source 1..19: mol_type = other RNA
tagattctgcctctgaact

SEQ ID NO: 44 - RNA, 19 nt, synthetic construct
  source 1..19: mol_type = other RNA
gattctgcctctgaactca

SEQ ID NO: 45 - RNA, 19 nt, synthetic construct
  source 1..19: mol_type = other RNA
ctggtgttcccaataaggt

SEQ ID NO: 46 - RNA, 19 nt, synthetic construct
  source 1..19: mol_type = other RNA
ggtgttcccaataaggtgg

SEQ ID NO: 47 - RNA, 19 nt, synthetic construct
  source 1..19: mol_type = other RNA
ttagctggcacttggatgg

SEQ ID NO: 48 - RNA, 19 nt, synthetic construct
  source 1..19: mol_type = other RNA
taatgagaagggagtatct

SEQ ID NO: 49 - RNA, 19 nt, synthetic construct
  source 1..19: mol_type = other RNA
gagaagggagtatctgtga

SEQ ID NO: 50 - RNA, 19 nt, synthetic construct
  source 1..19: mol_type = other RNA
gcatcagcatcatcgaacc

SEQ ID NO: 51 - RNA, 19 nt, synthetic construct
  source 1..19: mol_type = other RNA
tgaacaggaatggaaagga

SEQ ID NO: 52 - RNA, 19 nt, synthetic construct
  source 1..19: mol_type = other RNA
ctaccgagtccgtgtctac

SEQ ID NO: 53 - RNA, 19 nt, synthetic construct
  source 1..19: mol_type = other RNA
tgggaagccagaaattgta

SEQ ID NO: 54 - RNA, 19 nt, synthetic construct
  source 1..19: mol_type = other RNA
cctaatgagaagggagtat

SEQ ID NO: 55 - RNA, 19 nt, synthetic construct
  source 1..19: mol_type = other RNA
ttgtgttcagtttccattc

SEQ ID NO: 56 - RNA, 19 nt, synthetic construct
  source 1..19: mol_type = other RNA
atgtgttcagtttccattc

SEQ ID NO: 57 - RNA, 19 nt, synthetic construct
  source 1..19: mol_type = other RNA
ctgtgttcagtttccattc

SEQ ID NO: 58 - RNA, 19 nt, synthetic construct
  source 1..19: mol_type = other RNA
ntgtgttcagtttccattc

SEQ ID NO: 59 - RNA, 19 nt, synthetic construct
  source 1..19: mol_type = other RNA
ntgtgttcagtttccattn

SEQ ID NO: 60 - RNA, 19 nt, synthetic construct
  source 1..19: mol_type = other RNA
ttgtgttcagtttccattc

SEQ ID NO: 61 - RNA, 19 nt, synthetic construct
  source 1..19: mol_type = other RNA
atgtgttcagtttccattc

SEQ ID NO: 62 - RNA, 19 nt, synthetic construct
  source 1..19: mol_type = other RNA
ctgtgttcagtttccattc

SEQ ID NO: 63 - RNA, 19 nt, synthetic construct
  source 1..19: mol_type = other RNA
ntgtgttcagtttccattc

SEQ ID NO: 64 - RNA, 19 nt, synthetic construct
  source 1..19: mol_type = other RNA
ntgtgttcagtttccattn

SEQ ID NO: 65 - RNA, 19 nt, synthetic construct
  source 1..19: mol_type = other RNA
tgatgttttgagcacctac

SEQ ID NO: 66 - RNA, 19 nt, synthetic construct
  source 1..19: mol_type = other RNA
agatgttttgagcacctac

SEQ ID NO: 67 - RNA, 19 nt, synthetic construct
  source 1..19: mol_type = other RNA
ngatgttttgagcacctac

SEQ ID NO: 68 - RNA, 19 nt, synthetic construct
  source 1..19: mol_type = other RNA
ngatgttttgagcacctan

SEQ ID NO: 69 - RNA, 19 nt, synthetic construct
  source 1..19: mol_type = other RNA
ttccattcctgttcattgc

SEQ ID NO: 70 - RNA, 19 nt, synthetic construct
  source 1..19: mol_type = other RNA
atccattcctgttcattgc

SEQ ID NO: 71 - RNA, 19 nt, synthetic construct
  source 1..19: mol_type = other RNA
ntccattcctgttcattgc

SEQ ID NO: 72 - RNA, 19 nt, synthetic construct
  source 1..19: mol_type = other RNA
ntccattcctgttcattgn

SEQ ID NO: 73 - RNA, 19 nt, synthetic construct
  source 1..19: mol_type = other RNA
ttccattcctgttcattgc

SEQ ID NO: 74 - RNA, 19 nt, synthetic construct
  source 1..19: mol_type = other RNA
atccattcctgttcattgc

SEQ ID NO: 75 - RNA, 19 nt, synthetic construct
  source 1..19: mol_type = other RNA
ntccattcctgttcattgc

SEQ ID NO: 76 - RNA, 19 nt, synthetic construct
  source 1..19: mol_type = other RNA
ntccattcctgttcattgn

SEQ ID NO: 77 - RNA, 19 nt, synthetic construct
  source 1..19: mol_type = other RNA
tctgtgttcagtttccatt

SEQ ID NO: 78 - RNA, 19 nt, synthetic construct
  source 1..19: mol_type = other RNA
actgtgttcagtttccatt

SEQ ID NO: 79 - RNA, 19 nt, synthetic construct
  source 1..19: mol_type = other RNA
cctgtgttcagtttccatt

SEQ ID NO: 80 - RNA, 19 nt, synthetic construct
  source 1..19: mol_type = other RNA
nctgtgttcagtttccatt

SEQ ID NO: 81 - RNA, 19 nt, synthetic construct
  source 1..19: mol_type = other RNA
nctgtgttcagtttccatn

SEQ ID NO: 82 - RNA, 19 nt, synthetic construct
  source 1..19: mol_type = other RNA
tctgtgttcagtttccatt

SEQ ID NO: 83 - RNA, 19 nt, synthetic construct
  source 1..19: mol_type = other RNA
actgtgttcagtttccatt

SEQ ID NO: 84 - RNA, 19 nt, synthetic construct
  source 1..19: mol_type = other RNA
cctgtgttcagtttccatt

SEQ ID NO: 85 - RNA, 19 nt, synthetic construct
  source 1..19: mol_type = other RNA
nctgtgttcagtttccatt

SEQ ID NO: 86 - RNA, 19 nt, synthetic construct
  source 1..19: mol_type = other RNA
nctgtgttcagtttccatn

SEQ ID NO: 87 - RNA, 19 nt, synthetic construct
  source 1..19: mol_type = other RNA
ttggcttcccaggaatctg

SEQ ID NO: 88 - RNA, 19 nt, synthetic construct
  source 1..19: mol_type = other RNA
atggcttcccaggaatctg

SEQ ID NO: 89 - RNA, 19 nt, synthetic construct
  source 1..19: mol_type = other RNA
ctggcttcccaggaatctg

SEQ ID NO: 90 - RNA, 19 nt, synthetic construct
  source 1..19: mol_type = other RNA
ntggcttcccaggaatctg

SEQ ID NO: 91 - RNA, 19 nt, synthetic construct
  source 1..19: mol_type = other RNA
ntggcttcccaggaatctn

SEQ ID NO: 92 - RNA, 19 nt, synthetic construct
  source 1..19: mol_type = other RNA
ttggcttcccaggaatctg

SEQ ID NO: 93 - RNA, 19 nt, synthetic construct
  source 1..19: mol_type = other RNA
atggcttcccaggaatctg

SEQ ID NO: 94 - RNA, 19 nt, synthetic construct
  source 1..19: mol_type = other RNA
ctggcttcccaggaatctg

SEQ ID NO: 95 - RNA, 19 nt, synthetic construct
  source 1..19: mol_type = other RNA
ntggcttcccaggaatctg

SEQ ID NO: 96 - RNA, 19 nt, synthetic construct
  source 1..19: mol_type = other RNA
ntggcttcccaggaatctn

SEQ ID NO: 97 - RNA, 19 nt, synthetic construct
  source 1..19: mol_type = other RNA
acaatttctggcttcccag

SEQ ID NO: 98 - RNA, 19 nt, synthetic construct
  source 1..19: mol_type = other RNA
tcaatttctggcttcccag

SEQ ID NO: 99 - RNA, 19 nt, synthetic construct
  source 1..19: mol_type = other RNA
ncaatttctggcttcccag

SEQ ID NO: 100 - RNA, 19 nt, synthetic construct
  source 1..19: mol_type = other RNA
ncaatttctggcttcccan

SEQ ID NO: 101 - RNA, 19 nt, synthetic construct
  source 1..19: mol_type = other RNA
ttacacttcagcaccagtg

SEQ ID NO: 102 - RNA, 19 nt, synthetic construct
  source 1..19: mol_type = other RNA
atacacttcagcaccagtg

SEQ ID NO: 103 - RNA, 19 nt, synthetic construct
  source 1..19: mol_type = other RNA
ntacacttcagcaccagtg

SEQ ID NO: 104 - RNA, 19 nt, synthetic construct
  source 1..19: mol_type = other RNA
ntacacttcagcaccagtn

SEQ ID NO: 105 - RNA, 19 nt, synthetic construct
  source 1..19: mol_type = other RNA
taccttccaagcttctgtc

SEQ ID NO: 106 - RNA, 19 nt, synthetic construct
  source 1..19: mol_type = other RNA
gaccttccaagcttctgtc

SEQ ID NO: 107 - RNA, 19 nt, synthetic construct
  source 1..19: mol_type = other RNA
aaccttccaagcttctgtc

SEQ ID NO: 108 - RNA, 19 nt, synthetic construct
  source 1..19: mol_type = other RNA
naccttccaagcttctgtc

SEQ ID NO: 109 - RNA, 19 nt, synthetic construct
  source 1..19: mol_type = other RNA
naccttccaagcttctgtn

SEQ ID NO: 110 - RNA, 19 nt, synthetic construct
  source 1..19: mol_type = other RNA
taccttccaagcttctgtc

SEQ ID NO: 111 - RNA, 19 nt, synthetic construct
  source 1..19: mol_type = other RNA
gaccttccaagcttctgtc

SEQ ID NO: 112 - RNA, 19 nt, synthetic construct
  source 1..19: mol_type = other RNA
aaccttccaagcttctgtc

SEQ ID NO: 113 - RNA, 19 nt, synthetic construct
  source 1..19: mol_type = other RNA
naccttccaagcttctgtc

SEQ ID NO: 114 - RNA, 19 nt, synthetic construct
  source 1..19: mol_type = other RNA
naccttccaagcttctgtn

SEQ ID NO: 115 - RNA, 19 nt, synthetic construct
  source 1..19: mol_type = other RNA
tcggaaaatcccctcatcc

SEQ ID NO: 116 - RNA, 19 nt, synthetic construct
  source 1..19: mol_type = other RNA
ccggaaaatcccctcatcc

SEQ ID NO: 117 - RNA, 19 nt, synthetic construct
  source 1..19: mol_type = other RNA
acggaaaatcccctcatcc

SEQ ID NO: 118 - RNA, 19 nt, synthetic construct
  source 1..19: mol_type = other RNA
ncggaaaatcccctcatcc

SEQ ID NO: 119 - RNA, 19 nt, synthetic construct
  source 1..19: mol_type = other RNA
ncggaaaatcccctcatcn

SEQ ID NO: 120 - RNA, 19 nt, synthetic construct
  source 1..19: mol_type = other RNA
tcggaaaatcccctcatcc

SEQ ID NO: 121 - RNA, 19 nt, synthetic construct
  source 1..19: mol_type = other RNA
ccggaaaatcccctcatcc

SEQ ID NO: 122 - RNA, 19 nt, synthetic construct
  source 1..19: mol_type = other RNA
acggaaaatcccctcatcc

SEQ ID NO: 123 - RNA, 19 nt, synthetic construct
  source 1..19: mol_type = other RNA
ncggaaaatcccctcatcc

SEQ ID NO: 124 - RNA, 19 nt, synthetic construct
  source 1..19: mol_type = other RNA
ncggaaaatcccctcatcn

SEQ ID NO: 125 - RNA, 19 nt, synthetic construct
  source 1..19: mol_type = other RNA
tttctggcttcccaggaat

SEQ ID NO: 126 - RNA, 19 nt, synthetic construct
  source 1..19: mol_type = other RNA
attctggcttcccaggaat

SEQ ID NO: 127 - RNA, 19 nt, synthetic construct
  source 1..19: mol_type = other RNA
nttctggcttcccaggaat

SEQ ID NO: 128 - RNA, 19 nt, synthetic construct
  source 1..19: mol_type = other RNA
nttctggcttcccaggaan

SEQ ID NO: 129 - RNA, 19 nt, synthetic construct
  source 1..19: mol_type = other RNA
ttgagttcagaggcagaat

SEQ ID NO: 130 - RNA, 19 nt, synthetic construct
  source 1..19: mol_type = other RNA
gtgagttcagaggcagaat

SEQ ID NO: 131 - RNA, 19 nt, synthetic construct
  source 1..19: mol_type = other RNA
atgagttcagaggcagaat

SEQ ID NO: 132 - RNA, 19 nt, synthetic construct
  source 1..19: mol_type = other RNA
ntgagttcagaggcagaat

SEQ ID NO: 133 - RNA, 19 nt, synthetic construct
  source 1..19: mol_type = other RNA
ntgagttcagaggcagaan

SEQ ID NO: 134 - RNA, 19 nt, synthetic construct
  source 1..19: mol_type = other RNA
tctaagagtccctgcaggg

SEQ ID NO: 135 - RNA, 19 nt, synthetic construct
  source 1..19: mol_type = other RNA
actaagagtccctgcaggg

SEQ ID NO: 136 - RNA, 19 nt, synthetic construct
  source 1..19: mol_type = other RNA
gctaagagtccctgcaggg

SEQ ID NO: 137 - RNA, 19 nt, synthetic construct
  source 1..19: mol_type = other RNA
nctaagagtccctgcaggg

SEQ ID NO: 138 - RNA, 19 nt, synthetic construct
  source 1..19: mol_type = other RNA
nctaagagtccctgcaggn

SEQ ID NO: 139 - RNA, 19 nt, synthetic construct
  source 1..19: mol_type = other RNA
agctaagagtccctgcagg

SEQ ID NO: 140 - RNA, 19 nt, synthetic construct
  source 1..19: mol_type = other RNA
tgctaagagtccctgcagg

SEQ ID NO: 141 - RNA, 19 nt, synthetic construct
  source 1..19: mol_type = other RNA
ngctaagagtccctgcagg

SEQ ID NO: 142 - RNA, 19 nt, synthetic construct
  source 1..19: mol_type = other RNA
ngctaagagtccctgcagn

SEQ ID NO: 143 - RNA, 19 nt, synthetic construct
  source 1..19: mol_type = other RNA
agctaagagtccctgcagg

SEQ ID NO: 144 - RNA, 19 nt, synthetic construct
  source 1..19: mol_type = other RNA
tgctaagagtccctgcagg

SEQ ID NO: 145 - RNA, 19 nt, synthetic construct
  source 1..19: mol_type = other RNA
ngctaagagtccctgcagg

SEQ ID NO: 146 - RNA, 19 nt, synthetic construct
  source 1..19: mol_type = other RNA
ngctaagagtccctgcagn

SEQ ID NO: 147 - RNA, 19 nt, synthetic construct
  source 1..19: mol_type = other RNA
aagctacaggagaaggtgg

SEQ ID NO: 148 - RNA, 19 nt, synthetic construct
  source 1..19: mol_type = other RNA
tagctacaggagaaggtgg

SEQ ID NO: 149 - RNA, 19 nt, synthetic construct
  source 1..19: mol_type = other RNA
nagctacaggagaaggtgg

SEQ ID NO: 150 - RNA, 19 nt, synthetic construct
  source 1..19: mol_type = other RNA
nagctacaggagaaggtgn

SEQ ID NO: 151 - RNA, 19 nt, synthetic construct
  source 1..19: mol_type = other RNA
aagctacaggagaaggtgg

SEQ ID NO: 152 - RNA, 19 nt, synthetic construct
  source 1..19: mol_type = other RNA
tagctacaggagaaggtgg

SEQ ID NO: 153 - RNA, 19 nt, synthetic construct
  source 1..19: mol_type = other RNA
nagctacaggagaaggtgg

SEQ ID NO: 154 - RNA, 19 nt, synthetic construct
  source 1..19: mol_type = other RNA
nagctacaggagaaggtgn

SEQ ID NO: 155 - RNA, 19 nt, synthetic construct
  source 1..19: mol_type = other RNA
tctgaagctacaggagaag

SEQ ID NO: 156 - RNA, 19 nt, synthetic construct
  source 1..19: mol_type = other RNA
actgaagctacaggagaag

SEQ ID NO: 157 - RNA, 19 nt, synthetic construct
  source 1..19: mol_type = other RNA
gctgaagctacaggagaag

SEQ ID NO: 158 - RNA, 19 nt, synthetic construct
  source 1..19: mol_type = other RNA
nctgaagctacaggagaag

SEQ ID NO: 159 - RNA, 19 nt, synthetic construct
  source 1..19: mol_type = other RNA
nctgaagctacaggagaan

SEQ ID NO: 160 - RNA, 19 nt, synthetic construct
  source 1..19: mol_type = other RNA
tctgaagctacaggagaag

SEQ ID NO: 161 - RNA, 19 nt, synthetic construct
  source 1..19: mol_type = other RNA
actgaagctacaggagaag

SEQ ID NO: 162 - RNA, 19 nt, synthetic construct
  source 1..19: mol_type = other RNA
gctgaagctacaggagaag

SEQ ID NO: 163 - RNA, 19 nt, synthetic construct
  source 1..19: mol_type = other RNA
nctgaagctacaggagaag

SEQ ID NO: 164 - RNA, 19 nt, synthetic construct
  source 1..19: mol_type = other RNA
nctgaagctacaggagaan

SEQ ID NO: 165 - RNA, 19 nt, synthetic construct
  source 1..19: mol_type = other RNA
tacagactgaggaccagca

SEQ ID NO: 166 - RNA, 19 nt, synthetic construct
  source 1..19: mol_type = other RNA
aacagactgaggaccagca

SEQ ID NO: 167 - RNA, 19 nt, synthetic construct
  source 1..19: mol_type = other RNA
cacagactgaggaccagca

SEQ ID NO: 168 - RNA, 19 nt, synthetic construct
  source 1..19: mol_type = other RNA
nacagactgaggaccagca

SEQ ID NO: 169 - RNA, 19 nt, synthetic construct
  source 1..19: mol_type = other RNA
nacagactgaggaccagcn

SEQ ID NO: 170 - RNA, 19 nt, synthetic construct
  source 1..19: mol_type = other RNA
tacagactgaggaccagca

SEQ ID NO: 171 - RNA, 19 nt, synthetic construct
  source 1..19: mol_type = other RNA
aacagactgaggaccagca

SEQ ID NO: 172 - RNA, 19 nt, synthetic construct
  source 1..19: mol_type = other RNA
cacagactgaggaccagca

SEQ ID NO: 173 - RNA, 19 nt, synthetic construct
  source 1..19: mol_type = other RNA
nacagactgaggaccagca

SEQ ID NO: 174 - RNA, 19 nt, synthetic construct
  source 1..19: mol_type = other RNA
nacagactgaggaccagcn

SEQ ID NO: 175 - RNA, 19 nt, synthetic construct
  source 1..19: mol_type = other RNA
tcacagactgaggaccagc

SEQ ID NO: 176 - RNA, 19 nt, synthetic construct
  source 1..19: mol_type = other RNA
acacagactgaggaccagc

SEQ ID NO: 177 - RNA, 19 nt, synthetic construct
  source 1..19: mol_type = other RNA
ncacagactgaggaccagc

SEQ ID NO: 178 - RNA, 19 nt, synthetic construct
  source 1..19: mol_type = other RNA
ncacagactgaggaccagn

SEQ ID NO: 179 - RNA, 19 nt, synthetic construct
  source 1..19: mol_type = other RNA
tcacagactgaggaccagc

SEQ ID NO: 180 - RNA, 19 nt, synthetic construct
  source 1..19: mol_type = other RNA
acacagactgaggaccagc

SEQ ID NO: 181 - RNA, 19 nt, synthetic construct
  source 1..19: mol_type = other RNA
ncacagactgaggaccagc

SEQ ID NO: 182 - RNA, 19 nt, synthetic construct
  source 1..19: mol_type = other RNA
ncacagactgaggaccagn

SEQ ID NO: 183 - RNA, 19 nt, synthetic construct
  source 1..19: mol_type = other RNA
tcacagactgaggaccagc

SEQ ID NO: 184 - RNA, 19 nt, synthetic construct
  source 1..19: mol_type = other RNA
acacagactgaggaccagc

SEQ ID NO: 185 - RNA, 19 nt, synthetic construct
  source 1..19: mol_type = other RNA
ncacagactgaggaccagc

SEQ ID NO: 186 - RNA, 19 nt, synthetic construct
  source 1..19: mol_type = other RNA
ncacagactgaggaccagn

SEQ ID NO: 187 - RNA, 19 nt, synthetic construct
  source 1..19: mol_type = other RNA
tgaatctggtagacacgga

SEQ ID NO: 188 - RNA, 19 nt, synthetic construct
  source 1..19: mol_type = other RNA
agaatctggtagacacgga

SEQ ID NO: 189 - RNA, 19 nt, synthetic construct
  source 1..19: mol_type = other RNA
ggaatctggtagacacgga

SEQ ID NO: 190 - RNA, 19 nt, synthetic construct
  source 1..19: mol_type = other RNA
ngaatctggtagacacgga

SEQ ID NO: 191 - RNA, 19 nt, synthetic construct
  source 1..19: mol_type = other RNA
ngaatctggtagacacggn

SEQ ID NO: 192 - RNA, 19 nt, synthetic construct
  source 1..19: mol_type = other RNA
tgaatctggtagacacgga

SEQ ID NO: 193 - RNA, 19 nt, synthetic construct
  source 1..19: mol_type = other RNA
agaatctggtagacacgga

SEQ ID NO: 194 - RNA, 19 nt, synthetic construct
  source 1..19: mol_type = other RNA
ggaatctggtagacacgga

SEQ ID NO: 195 - RNA, 19 nt, synthetic construct
  source 1..19: mol_type = other RNA
ngaatctggtagacacgga

SEQ ID NO: 196 - RNA, 19 nt, synthetic construct
  source 1..19: mol_type = other RNA
ngaatctggtagacacggn

SEQ ID NO: 197 - RNA, 19 nt, synthetic construct
  source 1..19: mol_type = other RNA
taggaatctggtagacacg

SEQ ID NO: 198 - RNA, 19 nt, synthetic construct
  source 1..19: mol_type = other RNA
aaggaatctggtagacacg

SEQ ID NO: 199 - RNA, 19 nt, synthetic construct
  source 1..19: mol_type = other RNA
caggaatctggtagacacg

SEQ ID NO: 200 - RNA, 19 nt, synthetic construct
  source 1..19: mol_type = other RNA
naggaatctggtagacacg

SEQ ID NO: 201 - RNA, 19 nt, synthetic construct
  source 1..19: mol_type = other RNA
naggaatctggtagacacn

SEQ ID NO: 202 - RNA, 19 nt, synthetic construct
  source 1..19: mol_type = other RNA
taagctacaggagaaggtg

SEQ ID NO: 203 - RNA, 19 nt, synthetic construct
  source 1..19: mol_type = other RNA
aaagctacaggagaaggtg

SEQ ID NO: 204 - RNA, 19 nt, synthetic construct
  source 1..19: mol_type = other RNA
gaagctacaggagaaggtg

SEQ ID NO: 205 - RNA, 19 nt, synthetic construct
  source 1..19: mol_type = other RNA
naagctacaggagaaggtg

SEQ ID NO: 206 - RNA, 19 nt, synthetic construct
  source 1..19: mol_type = other RNA
naagctacaggagaaggtn

SEQ ID NO: 207 - RNA, 19 nt, synthetic construct
  source 1..19: mol_type = other RNA
taagctacaggagaaggtg

SEQ ID NO: 208 - RNA, 19 nt, synthetic construct
  source 1..19: mol_type = other RNA
aaagctacaggagaaggtg

SEQ ID NO: 209 - RNA, 19 nt, synthetic construct
  source 1..19: mol_type = other RNA
gaagctacaggagaaggtg

SEQ ID NO: 210 - RNA, 19 nt, synthetic construct
  source 1..19: mol_type = other RNA
naagctacaggagaaggtg

SEQ ID NO: 211 - RNA, 19 nt, synthetic construct
  source 1..19: mol_type = other RNA
naagctacaggagaaggtn

SEQ ID NO: 212 - RNA, 19 nt, synthetic construct
  source 1..19: mol_type = other RNA
tcatccagtggatttgagg

SEQ ID NO: 213 - RNA, 19 nt, synthetic construct
  source 1..19: mol_type = other RNA
acatccagtggatttgagg

SEQ ID NO: 214 - RNA, 19 nt, synthetic construct
  source 1..19: mol_type = other RNA
ncatccagtggatttgagg

SEQ ID NO: 215 - RNA, 19 nt, synthetic construct
  source 1..19: mol_type = other RNA
ncatccagtggatttgagn

SEQ ID NO: 216 - RNA, 19 nt, synthetic construct
  source 1..19: mol_type = other RNA
tcatccagtggatttgagg

SEQ ID NO: 217 - RNA, 19 nt, synthetic construct
  source 1..19: mol_type = other RNA
acatccagtggatttgagg

SEQ ID NO: 218 - RNA, 19 nt, synthetic construct
  source 1..19: mol_type = other RNA
ncatccagtggatttgagg

SEQ ID NO: 219 - RNA, 19 nt, synthetic construct
  source 1..19: mol_type = other RNA
ncatccagtggatttgagn

SEQ ID NO: 220 - RNA, 19 nt, synthetic construct
  source 1..19: mol_type = other RNA
agttcagaggcagaatcta

SEQ ID NO: 221 - RNA, 19 nt, synthetic construct
  source 1..19: mol_type = other RNA
tgttcagaggcagaatcta

SEQ ID NO: 222 - RNA, 19 nt, synthetic construct
  source 1..19: mol_type = other RNA
ngttcagaggcagaatcta

SEQ ID NO: 223 - RNA, 19 nt, synthetic construct
  source 1..19: mol_type = other RNA
ngttcagaggcagaatctn

SEQ ID NO: 224 - RNA, 19 nt, synthetic construct
  source 1..19: mol_type = other RNA
agttcagaggcagaatcta

SEQ ID NO: 225 - RNA, 19 nt, synthetic construct
  source 1..19: mol_type = other RNA
tgttcagaggcagaatcta

SEQ ID NO: 226 - RNA, 19 nt, synthetic construct
  source 1..19: mol_type = other RNA
ngttcagaggcagaatcta

SEQ ID NO: 227 - RNA, 19 nt, synthetic construct
  source 1..19: mol_type = other RNA
ngttcagaggcagaatctn

SEQ ID NO: 228 - RNA, 19 nt, synthetic construct
  source 1..19: mol_type = other RNA
tgagttcagaggcagaatc

SEQ ID NO: 229 - RNA, 19 nt, synthetic construct
  source 1..19: mol_type = other RNA
agagttcagaggcagaatc

SEQ ID NO: 230 - RNA, 19 nt, synthetic construct
  source 1..19: mol_type = other RNA
ngagttcagaggcagaatn

SEQ ID NO: 231 - RNA, 19 nt, synthetic construct
  source 1..19: mol_type = other RNA
ngagttcagaggcagaatn

SEQ ID NO: 232 - RNA, 19 nt, synthetic construct
  source 1..19: mol_type = other RNA
accttattgggaacaccag

SEQ ID NO: 233 - RNA, 19 nt, synthetic construct
  source 1..19: mol_type = other RNA
tccttattgggaacaccag

SEQ ID NO: 234 - RNA, 19 nt, synthetic construct
  source 1..19: mol_type = other RNA
nccttattgggaacaccag

SEQ ID NO: 235 - RNA, 19 nt, synthetic construct
  source 1..19: mol_type = other RNA
nccttattgggaacaccan

SEQ ID NO: 236 - RNA, 19 nt, synthetic construct
  source 1..19: mol_type = other RNA
tcaccttattgggaacacc

SEQ ID NO: 237 - RNA, 19 nt, synthetic construct
  source 1..19: mol_type = other RNA
acaccttattgggaacacc

SEQ ID NO: 238 - RNA, 19 nt, synthetic construct
  source 1..19: mol_type = other RNA
ccaccttattgggaacacc

SEQ ID NO: 239 - RNA, 19 nt, synthetic construct
  source 1..19: mol_type = other RNA
ncaccttattgggaacacc

SEQ ID NO: 240 - RNA, 19 nt, synthetic construct
  source 1..19: mol_type = other RNA
ncaccttattgggaacacn

SEQ ID NO: 241 - RNA, 19 nt, synthetic construct
  source 1..19: mol_type = other RNA
tcaccttattgggaacacc

SEQ ID NO: 242 - RNA, 19 nt, synthetic construct
  source 1..19: mol_type = other RNA
acaccttattgggaacacc

SEQ ID NO: 243 - RNA, 19 nt, synthetic construct
  source 1..19: mol_type = other RNA
ccaccttattgggaacacc

SEQ ID NO: 244 - RNA, 19 nt, synthetic construct
  source 1..19: mol_type = other RNA
ncaccttattgggaacacc

SEQ ID NO: 245 - RNA, 19 nt, synthetic construct
  source 1..19: mol_type = other RNA
ncaccttattgggaacacn

SEQ ID NO: 246 - RNA, 19 nt, synthetic construct
  source 1..19: mol_type = other RNA
tcatccaagtgccagctaa

SEQ ID NO: 247 - RNA, 19 nt, synthetic construct
  source 1..19: mol_type = other RNA
acatccaagtgccagctaa

SEQ ID NO: 248 - RNA, 19 nt, synthetic construct
  source 1..19: mol_type = other RNA
ccatccaagtgccagctaa

SEQ ID NO: 249 - RNA, 19 nt, synthetic construct
  source 1..19: mol_type = other RNA
ncatccaagtgccagctaa

SEQ ID NO: 250 - RNA, 19 nt, synthetic construct
  source 1..19: mol_type = other RNA
ncatccaagtgccagctan

SEQ ID NO: 251 - RNA, 19 nt, synthetic construct
  source 1..19: mol_type = other RNA
tcatccaagtgccagctaa

SEQ ID NO: 252 - RNA, 19 nt, synthetic construct
  source 1..19: mol_type = other RNA
acatccaagtgccagctaa

SEQ ID NO: 253 - RNA, 19 nt, synthetic construct
  source 1..19: mol_type = other RNA
ccatccaagtgccagctaa

SEQ ID NO: 254 - RNA, 19 nt, synthetic construct
  source 1..19: mol_type = other RNA
ncatccaagtgccagctaa

SEQ ID NO: 255 - RNA, 19 nt, synthetic construct
  source 1..19: mol_type = other RNA
ncatccaagtgccagctan

SEQ ID NO: 256 - RNA, 19 nt, synthetic construct
  source 1..19: mol_type = other RNA
agatactcccttctcatta

SEQ ID NO: 257 - RNA, 19 nt, synthetic construct
  source 1..19: mol_type = other RNA
tgatactcccttctcatta

SEQ ID NO: 258 - RNA, 19 nt, synthetic construct
  source 1..19: mol_type = other RNA
ngatactcccttctcatta

SEQ ID NO: 259 - RNA, 19 nt, synthetic construct
  source 1..19: mol_type = other RNA
ngatactcccttctcattn

SEQ ID NO: 260 - RNA, 19 nt, synthetic construct
  source 1..19: mol_type = other RNA
agatactcccttctcatta

SEQ ID NO: 261 - RNA, 19 nt, synthetic construct
  source 1..19: mol_type = other RNA
tgatactcccttctcatta

SEQ ID NO: 262 - RNA, 19 nt, synthetic construct
  source 1..19: mol_type = other RNA
ngatactcccttctcatta

SEQ ID NO: 263 - RNA, 19 nt, synthetic construct
  source 1..19: mol_type = other RNA
ngatactcccttctcattn

SEQ ID NO: 264 - RNA, 19 nt, synthetic construct
  source 1..19: mol_type = other RNA
tcacagatactcccttctc

SEQ ID NO: 265 - RNA, 19 nt, synthetic construct
  source 1..19: mol_type = other RNA
acacagatactcccttctc

SEQ ID NO: 266 - RNA, 19 nt, synthetic construct
  source 1..19: mol_type = other RNA
ncacagatactcccttctc

SEQ ID NO: 267 - RNA, 19 nt, synthetic construct
  source 1..19: mol_type = other RNA
ncacagatactcccttctn

SEQ ID NO: 268 - RNA, 19 nt, synthetic construct
  source 1..19: mol_type = other RNA
tcacagatactcccttctc

SEQ ID NO: 269 - RNA, 19 nt, synthetic construct
  source 1..19: mol_type = other RNA
acacagatactcccttctc

SEQ ID NO: 270 - RNA, 19 nt, synthetic construct
  source 1..19: mol_type = other RNA
ncacagatactcccttctc

SEQ ID NO: 271 - RNA, 19 nt, synthetic construct
  source 1..19: mol_type = other RNA
ncacagatactcccttctn

SEQ ID NO: 272 - RNA, 19 nt, synthetic construct
  source 1..19: mol_type = other RNA
tgttcgatgatgctgatgc

SEQ ID NO: 273 - RNA, 19 nt, synthetic construct
  source 1..19: mol_type = other RNA
agttcgatgatgctgatgc

SEQ ID NO: 274 - RNA, 19 nt, synthetic construct
  source 1..19: mol_type = other RNA
ggttcgatgatgctgatgc

SEQ ID NO: 275 - RNA, 19 nt, synthetic construct
  source 1..19: mol_type = other RNA
ngttcgatgatgctgatgc

SEQ ID NO: 276 - RNA, 19 nt, synthetic construct
  source 1..19: mol_type = other RNA
ngttcgatgatgctgatgn

SEQ ID NO: 277 - RNA, 19 nt, synthetic construct
  source 1..19: mol_type = other RNA
tgttcgatgatgctgatgc

SEQ ID NO: 278 - RNA, 19 nt, synthetic construct
  source 1..19: mol_type = other RNA
agttcgatgatgctgatgc

SEQ ID NO: 279 - RNA, 19 nt, synthetic construct
  source 1..19: mol_type = other RNA
ggttcgatgatgctgatgc

SEQ ID NO: 280 - RNA, 19 nt, synthetic construct
  source 1..19: mol_type = other RNA
ngttcgatgatgctgatgc

SEQ ID NO: 281 - RNA, 19 nt, synthetic construct
  source 1..19: mol_type = other RNA
ngttcgatgatgctgatgn

SEQ ID NO: 282 - RNA, 19 nt, synthetic construct
  source 1..19: mol_type = other RNA
acctttccattcctgttca

SEQ ID NO: 283 - RNA, 19 nt, synthetic construct
  source 1..19: mol_type = other RNA
tcctttccattcctgttca

SEQ ID NO: 284 - RNA, 19 nt, synthetic construct
  source 1..19: mol_type = other RNA
ncctttccattcctgttca

SEQ ID NO: 285 - RNA, 19 nt, synthetic construct
  source 1..19: mol_type = other RNA
ncctttccattcctgttcn

SEQ ID NO: 286 - RNA, 19 nt, synthetic construct
  source 1..19: mol_type = other RNA
atagacacggactcggtag

SEQ ID NO: 287 - RNA, 19 nt, synthetic construct
  source 1..19: mol_type = other RNA
ttagacacggactcggtag

SEQ ID NO: 288 - RNA, 19 nt, synthetic construct
  source 1..19: mol_type = other RNA
ntagacacggactcggtag

SEQ ID NO: 289 - RNA, 19 nt, synthetic construct
  source 1..19: mol_type = other RNA
ntagacacggactcggtan

SEQ ID NO: 290 - RNA, 19 nt, synthetic construct
  source 1..19: mol_type = other RNA
aacaatttctggcttccca

SEQ ID NO: 291 - RNA, 19 nt, synthetic construct
  source 1..19: mol_type = other RNA
tacaatttctggcttccca

SEQ ID NO: 292 - RNA, 19 nt, synthetic construct
  source 1..19: mol_type = other RNA
nacaatttctggcttccca

SEQ ID NO: 293 - RNA, 19 nt, synthetic construct
  source 1..19: mol_type = other RNA
nacaatttctggcttcccn

SEQ ID NO: 294 - RNA, 19 nt, synthetic construct
  source 1..19: mol_type = other RNA
atactcccttctcattagg

SEQ ID NO: 295 - RNA, 19 nt, synthetic construct
  source 1..19: mol_type = other RNA
ttactcccttctcattagg

SEQ ID NO: 296 - RNA, 19 nt, synthetic construct
  source 1..19: mol_type = other RNA
ntactcccttctcattagg

SEQ ID NO: 297 - RNA, 19 nt, synthetic construct
  source 1..19: mol_type = other RNA
ntactcccttctcattagn

SEQ ID NO: 298 - RNA, 19 nt, synthetic construct
  source 1..19: mol_type = other RNA
gaatggaaactgaacacaa

SEQ ID NO: 299 - RNA, 19 nt, synthetic construct
  source 1..19: mol_type = other RNA
gaatggaaactgaacacat

SEQ ID NO: 300 - RNA, 19 nt, synthetic construct
  source 1..19: mol_type = other RNA
gaatggaaactgaacacag

SEQ ID NO: 301 - RNA, 19 nt, synthetic construct
  source 1..19: mol_type = other RNA
gaatggaaactgaacacan

SEQ ID NO: 302 - RNA, 19 nt, synthetic construct
  source 1..19: mol_type = other RNA
naatggaaactgaacacan

SEQ ID NO: 303 - RNA, 19 nt, synthetic construct
  modified_base 12: mod_base = i
  source 1..19: mol_type = other RNA
gaatggaaactnaacacaa

SEQ ID NO: 304 - RNA, 19 nt, synthetic construct
  modified_base 12: mod_base = i
  source 1..19: mol_type = other RNA
gaatggaaactnaacacat

SEQ ID NO: 305 - RNA, 19 nt, synthetic construct
  modified_base 12: mod_base = i
  source 1..19: mol_type = other RNA
gaatggaaactnaacacag

SEQ ID NO: 306 - RNA, 19 nt, synthetic construct
  modified_base 12: mod_base = i
  source 1..19: mol_type = other RNA
gaatggaaactnaacacan

SEQ ID NO: 307 - RNA, 18 nt, synthetic construct
  modified_base 12: mod_base = i
  source 1..18: mol_type = other RNA
naatggaaactaacacan

SEQ ID NO: 308 - RNA, 19 nt, synthetic construct
  source 1..19: mol_type = other RNA
gtaggtgctcaaaacatca

SEQ ID NO: 309 - RNA, 19 nt, synthetic construct
  source 1..19: mol_type = other RNA
gtaggtgctcaaaacatct

SEQ ID NO: 310 - RNA, 19 nt, synthetic construct
  source 1..19: mol_type = other RNA
gtaggtgctcaaaacatcn

SEQ ID NO: 311 - RNA, 19 nt, synthetic construct
  source 1..19: mol_type = other RNA
ntaggtgctcaaaacatcn

SEQ ID NO: 312 - RNA, 19 nt, synthetic construct
  source 1..19: mol_type = other RNA
gcaatgaacaggaatggaa

SEQ ID NO: 313 - RNA, 19 nt, synthetic construct
  source 1..19: mol_type = other RNA
gcaatgaacaggaatggat

SEQ ID NO: 314 - RNA, 19 nt, synthetic construct
  source 1..19: mol_type = other RNA
gcaatgaacaggaatggan

SEQ ID NO: 315 - RNA, 19 nt, synthetic construct
  source 1..19: mol_type = other RNA
ncaatgaacaggaatggan

SEQ ID NO: 316 - RNA, 19 nt, synthetic construct
  modified_base 16: mod_base = i
  source 1..19: mol_type = other RNA
gcaatgaacaggaatngaa

SEQ ID NO: 317 - RNA, 19 nt, synthetic construct
  modified_base 16: mod_base = i
  source 1..19: mol_type = other RNA
gcaatgaacaggaatngat

SEQ ID NO: 318 - RNA, 19 nt, synthetic construct
  modified_base 16: mod_base = i
  source 1..19: mol_type = other RNA
gcaatgaacaggaatngan

SEQ ID NO: 319 - RNA, 19 nt, synthetic construct
  modified_base 16: mod_base = i
  source 1..19: mol_type = other RNA
ncaatgaacaggaatngan

SEQ ID NO: 320 - RNA, 19 nt, synthetic construct
  source 1..19: mol_type = other RNA
aatggaaactgaacacaga

SEQ ID NO: 321 - RNA, 19 nt, synthetic construct
  source 1..19: mol_type = other RNA
aatggaaactgaacacagt

SEQ ID NO: 322 - RNA, 19 nt, synthetic construct
  source 1..19: mol_type = other RNA
aatggaaactgaacacagg

SEQ ID NO: 323 - RNA, 19 nt, synthetic construct
  source 1..19: mol_type = other RNA
aatggaaactgaacacagn

SEQ ID NO: 324 - RNA, 19 nt, synthetic construct
  source 1..19: mol_type = other RNA
natggaaactgaacacagn

SEQ ID NO: 325 - RNA, 19 nt, synthetic construct
  modified_base 18: mod_base = i
  source 1..19: mol_type = other RNA
aatggaaactgaacacana

SEQ ID NO: 326 - RNA, 19 nt, synthetic construct
  modified_base 18: mod_base = i
  source 1..19: mol_type = other RNA
aatggaaactgaacacant

SEQ ID NO: 327 - RNA, 19 nt, synthetic construct
  modified_base 18: mod_base = i
  source 1..19: mol_type = other RNA
aatggaaactgaacacang

SEQ ID NO: 328 - RNA, 19 nt, synthetic construct
  modified_base 18: mod_base = i
  source 1..19: mol_type = other RNA
aatggaaactgaacacann

SEQ ID NO: 329 - RNA, 19 nt, synthetic construct
  modified_base 18: mod_base = i
  source 1..19: mol_type = other RNA
natggaaactgaacacann

SEQ ID NO: 330 - RNA, 19 nt, synthetic construct
  source 1..19: mol_type = other RNA
cagattcctgggaagccaa

SEQ ID NO: 331 - RNA, 19 nt, synthetic construct
  source 1..19: mol_type = other RNA
cagattcctgggaagccat

SEQ ID NO: 332 - RNA, 19 nt, synthetic construct
  source 1..19: mol_type = other RNA
cagattcctgggaagccag

SEQ ID NO: 333 - RNA, 19 nt, synthetic construct
  source 1..19: mol_type = other RNA
cagattcctgggaagccan

SEQ ID NO: 334 - RNA, 19 nt, synthetic construct
  source 1..19: mol_type = other RNA
nagattcctgggaagccan

SEQ ID NO: 335 - RNA, 19 nt, synthetic construct
  modified_base 15: mod_base = i
  source 1..19: mol_type = other RNA
cagattcctgggaanccaa

SEQ ID NO: 336 - RNA, 19 nt, synthetic construct
  modified_base 15: mod_base = i
  source 1..19: mol_type = other RNA
cagattcctgggaanccat

SEQ ID NO: 337 - RNA, 19 nt, synthetic construct
  modified_base 15: mod_base = i
  source 1..19: mol_type = other RNA
cagattcctgggaanccag

SEQ ID NO: 338 - RNA, 19 nt, synthetic construct
  modified_base 15: mod_base = i
  source 1..19: mol_type = other RNA
cagattcctgggaanccan

SEQ ID NO: 339 - RNA, 19 nt, synthetic construct
  modified_base 15: mod_base = i
  source 1..19: mol_type = other RNA
nagattcctgggaanccan

SEQ ID NO: 340 - RNA, 19 nt, synthetic construct
  source 1..19: mol_type = other RNA
ctgggaagccagaaattgt

SEQ ID NO: 341 - RNA, 19 nt, synthetic construct
  source 1..19: mol_type = other RNA
ctgggaagccagaaattga

SEQ ID NO: 342 - RNA, 19 nt, synthetic construct
  source 1..19: mol_type = other RNA
ctgggaagccagaaattgn

SEQ ID NO: 343 - RNA, 19 nt, synthetic construct
  source 1..19: mol_type = other RNA
ntgggaagccagaaattgn

SEQ ID NO: 344 - RNA, 19 nt, synthetic construct
  source 1..19: mol_type = other RNA
cactggtgctgaagtgtaa

SEQ ID NO: 345 - RNA, 19 nt, synthetic construct
  source 1..19: mol_type = other RNA
cactggtgctgaagtgtat

SEQ ID NO: 346 - RNA, 19 nt, synthetic construct
  source 1..19: mol_type = other RNA
cactggtgctgaagtgtan

SEQ ID NO: 347 - RNA, 19 nt, synthetic construct
  source 1..19: mol_type = other RNA
nactggtgctgaagtgtan

SEQ ID NO: 348 - RNA, 19 nt, synthetic construct
  source 1..19: mol_type = other RNA
gacagaagcttggaaggta

SEQ ID NO: 349 - RNA, 19 nt, synthetic construct
  source 1..19: mol_type = other RNA
gacagaagcttggaaggtc

SEQ ID NO: 350 - RNA, 19 nt, synthetic construct
  source 1..19: mol_type = other RNA
gacagaagcttggaaggtt

SEQ ID NO: 351 - RNA, 19 nt, synthetic construct
  source 1..19: mol_type = other RNA
gacagaagcttggaaggtn

SEQ ID NO: 352 - RNA, 19 nt, synthetic construct
  source 1..19: mol_type = other RNA
nacagaagcttggaaggtn

SEQ ID NO: 353 - RNA, 19 nt, synthetic construct
  modified_base 17: mod_base = i
  source 1..19: mol_type = other RNA
gacagaagcttggaagnta

SEQ ID NO: 354 - RNA, 19 nt, synthetic construct
  modified_base 17: mod_base = i
  source 1..19: mol_type = other RNA
gacagaagcttggaagntc

SEQ ID NO: 355 - RNA, 19 nt, synthetic construct
  modified_base 17: mod_base = i
  source 1..19: mol_type = other RNA
gacagaagcttggaagntt

SEQ ID NO: 356 - RNA, 19 nt, synthetic construct
  modified_base 17: mod_base = i
  source 1..19: mol_type = other RNA
gacagaagcttggaagntn

SEQ ID NO: 357 - RNA, 19 nt, synthetic construct
  modified_base 17: mod_base = i
  source 1..19: mol_type = other RNA
nacagaagcttggaagntn

SEQ ID NO: 358 - RNA, 19 nt, synthetic construct
  source 1..19: mol_type = other RNA
ggatgaggggattttccga

SEQ ID NO: 359 - RNA, 19 nt, synthetic construct
  source 1..19: mol_type = other RNA
ggatgaggggattttccgg

SEQ ID NO: 360 - RNA, 19 nt, synthetic construct
  source 1..19: mol_type = other RNA
ggatgaggggattttccgt

SEQ ID NO: 361 - RNA, 19 nt, synthetic construct
  source 1..19: mol_type = other RNA
ggatgaggggattttccgn

SEQ ID NO: 362 - RNA, 19 nt, synthetic construct
  source 1..19: mol_type = other RNA
ngatgaggggattttccgn

SEQ ID NO: 363 - RNA, 19 nt, synthetic construct
  modified_base 18: mod_base = i
  source 1..19: mol_type = other RNA
ggatgaggggattttccna

SEQ ID NO: 364 - RNA, 19 nt, synthetic construct
  modified_base 18: mod_base = i
  source 1..19: mol_type = other RNA
ggatgaggggattttccng

SEQ ID NO: 365 - RNA, 19 nt, synthetic construct
  modified_base 18: mod_base = i
  source 1..19: mol_type = other RNA
ggatgaggggattttccnt

SEQ ID NO: 366 - RNA, 19 nt, synthetic construct
  modified_base 18: mod_base = i
  source 1..19: mol_type = other RNA
ggatgaggggattttccnn

SEQ ID NO: 367 - RNA, 19 nt, synthetic construct
  modified_base 18: mod_base = i
  source 1..19: mol_type = other RNA
ngatgaggggattttccnn

SEQ ID NO: 368 - RNA, 19 nt, synthetic construct
  source 1..19: mol_type = other RNA
attcctgggaagctagaaa

SEQ ID NO: 369 - RNA, 19 nt, synthetic construct
  source 1..19: mol_type = other RNA
attcctgggaagctagaat

SEQ ID NO: 370 - RNA, 19 nt, synthetic construct
  source 1..19: mol_type = other RNA
attcctgggaagctagaan

SEQ ID NO: 371 - RNA, 19 nt, synthetic construct
  source 1..19: mol_type = other RNA
nttcctgggaagctagaan

SEQ ID NO: 372 - RNA, 19 nt, synthetic construct
  source 1..19: mol_type = other RNA
attctgcctctgaactcac

SEQ ID NO: 373 - RNA, 19 nt, synthetic construct
  source 1..19: mol_type = other RNA
attctgcctctgaactcac

SEQ ID NO: 374 - RNA, 19 nt, synthetic construct
  source 1..19: mol_type = other RNA
attctgcctctgaactcat

SEQ ID NO: 375 - RNA, 19 nt, synthetic construct
  source 1..19: mol_type = other RNA
attctgcctctgaactcan

SEQ ID NO: 376 - RNA, 19 nt, synthetic construct
  source 1..19: mol_type = other RNA
nttctgcctctgaactcan

SEQ ID NO: 377 - RNA, 19 nt, synthetic construct
  source 1..19: mol_type = other RNA
ccctgcagggactcttaga

SEQ ID NO: 378 - RNA, 19 nt, synthetic construct
  source 1..19: mol_type = other RNA
ccctgcagggactcttagt

SEQ ID NO: 379 - RNA, 19 nt, synthetic construct
  source 1..19: mol_type = other RNA
ccctgcagggactcttagc

SEQ ID NO: 380 - RNA, 19 nt, synthetic construct
  source 1..19: mol_type = other RNA
ccctgcagggactcttagn

SEQ ID NO: 381 - RNA, 19 nt, synthetic construct
  source 1..19: mol_type = other RNA
ncctgcagggactcttagn

SEQ ID NO: 382 - RNA, 19 nt, synthetic construct
  source 1..19: mol_type = other RNA
cctgcagggactcttagct

SEQ ID NO: 383 - RNA, 19 nt, synthetic construct
  source 1..19: mol_type = other RNA
cctgcagggactcttagca

SEQ ID NO: 384 - RNA, 19 nt, synthetic construct
  source 1..19: mol_type = other RNA
cctgcagggactcttagcn

SEQ ID NO: 385 - RNA, 19 nt, synthetic construct
  source 1..19: mol_type = other RNA
nctgcagggactcttagcn

SEQ ID NO: 386 - RNA, 19 nt, synthetic construct
  modified_base 17: mod_base = i
  source 1..19: mol_type = other RNA
cctgcagggactcttanct

SEQ ID NO: 387 - RNA, 19 nt, synthetic construct
  modified_base 17: mod_base = i
  source 1..19: mol_type = other RNA
cctgcagggactcttanca

SEQ ID NO: 388 - RNA, 19 nt, synthetic construct
  modified_base 17: mod_base = i
  source 1..19: mol_type = other RNA
cctgcagggactcttancn

SEQ ID NO: 389 - RNA, 19 nt, synthetic construct
  modified_base 17: mod_base = i
  source 1..19: mol_type = other RNA
nctgcagggactcttancn

SEQ ID NO: 390 - RNA, 19 nt, synthetic construct
  source 1..19: mol_type = other RNA
ccaccttctcctgtagctt

SEQ ID NO: 391 - RNA, 19 nt, synthetic construct
  source 1..19: mol_type = other RNA
ccaccttctcctgtagcta

SEQ ID NO: 392 - RNA, 19 nt, synthetic construct
  source 1..19: mol_type = other RNA
ccaccttctcctgtagctn

SEQ ID NO: 393 - RNA, 19 nt, synthetic construct
  source 1..19: mol_type = other RNA
ncaccttctcctgtagctn

SEQ ID NO: 394 - RNA, 19 nt, synthetic construct
  modified_base 16: mod_base = i
  source 1..19: mol_type = other RNA
ccaccttctcctgtanctt

SEQ ID NO: 395 - RNA, 19 nt, synthetic construct
  modified_base 16: mod_base = i
  source 1..19: mol_type = other RNA
ccaccttctcctgtancta

SEQ ID NO: 396 - RNA, 19 nt, synthetic construct
  modified_base 16: mod_base = i
  source 1..19: mol_type = other RNA
ccaccttctcctgtanctn

SEQ ID NO: 397 - RNA, 19 nt, synthetic construct
  modified_base 16: mod_base = i
  source 1..19: mol_type = other RNA
ncaccttctcctgtanctn

SEQ ID NO: 398 - RNA, 19 nt, synthetic construct
  source 1..19: mol_type = other RNA
cttctcctgtagcttcaga

SEQ ID NO: 399 - RNA, 19 nt, synthetic construct
  source 1..19: mol_type = other RNA
cttctcctgtagcttcagt

SEQ ID NO: 400 - RNA, 19 nt, synthetic construct
  source 1..19: mol_type = other RNA
cttctcctgtagcttcagc

SEQ ID NO: 401 - RNA, 19 nt, synthetic construct
  source 1..19: mol_type = other RNA
cttctcctgtagcttcagn

SEQ ID NO: 402 - RNA, 19 nt, synthetic construct
  source 1..19: mol_type = other RNA
nttctcctgtagcttcagn

SEQ ID NO: 403 - RNA, 19 nt, synthetic construct
  modified_base 18: mod_base = i
  source 1..19: mol_type = other RNA
cttctcctgtagcttcana

SEQ ID NO: 404 - RNA, 19 nt, synthetic construct
  modified_base 18: mod_base = i
  source 1..19: mol_type = other RNA
cttctcctgtagcttcant

SEQ ID NO: 405 - RNA, 19 nt, synthetic construct
  modified_base 18: mod_base = i
  source 1..19: mol_type = other RNA
cttctcctgtagcttcanc

SEQ ID NO: 406 - RNA, 19 nt, synthetic construct
  modified_base 18: mod_base = i
  source 1..19: mol_type = other RNA
cttctcctgtagcttcann

SEQ ID NO: 407 - RNA, 19 nt, synthetic construct
  modified_base 18: mod_base = i
  source 1..19: mol_type = other RNA
nttctcctgtagcttcann

SEQ ID NO: 408 - RNA, 19 nt, synthetic construct
  source 1..19: mol_type = other RNA
tgctggtcctcagtctgta

SEQ ID NO: 409 - RNA, 19 nt, synthetic construct
  source 1..19: mol_type = other RNA
tgctggtcctcagtctgtt

SEQ ID NO: 410 - RNA, 19 nt, synthetic construct
  source 1..19: mol_type = other RNA
tgctggtcctcagtctgtg

SEQ ID NO: 411 - RNA, 19 nt, synthetic construct
  source 1..19: mol_type = other RNA
tgctggtcctcagtctgtn

SEQ ID NO: 412 - RNA, 19 nt, synthetic construct
  source 1..19: mol_type = other RNA
tgctggtcctcagtctgtn

SEQ ID NO: 413 - RNA, 19 nt, synthetic construct
  modified_base 17: mod_base = i
  source 1..19: mol_type = other RNA
tgctggtcctcagtctnta

SEQ ID NO: 414 - RNA, 19 nt, synthetic construct
  modified_base 17: mod_base = i
  source 1..19: mol_type = other RNA
tgctggtcctcagtctntt

SEQ ID NO: 415 - RNA, 19 nt, synthetic construct
  modified_base 17: mod_base = i
  source 1..19: mol_type = other RNA
tgctggtcctcagtctntg

SEQ ID NO: 416 - RNA, 19 nt, synthetic construct
  modified_base 17: mod_base = i
  source 1..19: mol_type = other RNA
tgctggtcctcagtctntn

SEQ ID NO: 417 - RNA, 19 nt, synthetic construct
  modified_base 17: mod_base = i
  source 1..19: mol_type = other RNA
tgctggtcctcagtctntn

SEQ ID NO: 418 - RNA, 19 nt, synthetic construct
  source 1..19: mol_type = other RNA
gctggtcctcagtctgtga

SEQ ID NO: 419 - RNA, 19 nt, synthetic construct
  source 1..19: mol_type = other RNA
gctggtcctcagtctgtgt

SEQ ID NO: 420 - RNA, 19 nt, synthetic construct
  source 1..19: mol_type = other RNA
gctggtcctcagtctgtgn

SEQ ID NO: 421 - RNA, 19 nt, synthetic construct
  source 1..19: mol_type = other RNA
nctggtcctcagtctgtgn

SEQ ID NO: 422 - RNA, 19 nt, synthetic construct
  modified_base 18: mod_base = i
  source 1..19: mol_type = other RNA
gctggtcctcagtctgtna

SEQ ID NO: 423 - RNA, 19 nt, synthetic construct
  modified_base 18: mod_base = i
  source 1..19: mol_type = other RNA
gctggtcctcagtctgtnt

SEQ ID NO: 424 - RNA, 19 nt, synthetic construct
  modified_base 18: mod_base = i
  source 1..19: mol_type = other RNA
gctggtcctcagtctgtnn

SEQ ID NO: 425 - RNA, 19 nt, synthetic construct
  modified_base 18: mod_base = i
  source 1..19: mol_type = other RNA
nctggtcctcagtctgtnn

SEQ ID NO: 426 - RNA, 19 nt, synthetic construct
  modified_base 16: mod_base = i
  source 1..19: mol_type = other RNA
gctggtcctcagtctntga

SEQ ID NO: 427 - RNA, 19 nt, synthetic construct
  modified_base 16: mod_base = i
  source 1..19: mol_type = other RNA
gctggtcctcagtctntgt

SEQ ID NO: 428 - RNA, 19 nt, synthetic construct
  modified_base 16: mod_base = i
  source 1..19: mol_type = other RNA
gctggtcctcagtctntgn

SEQ ID NO: 429 - RNA, 19 nt, synthetic construct
  modified_base 16: mod_base = i
  source 1..19: mol_type = other RNA
nctggtcctcagtctntgn

SEQ ID NO: 430 - RNA, 19 nt, synthetic construct
  source 1..19: mol_type = other RNA
tccgtgtctaccagattca

SEQ ID NO: 431 - RNA, 19 nt, synthetic construct
  source 1..19: mol_type = other RNA
tccgtgtctaccagattct

SEQ ID NO: 432 - RNA, 19 nt, synthetic construct
  source 1..19: mol_type = other RNA
tccgtgtctaccagattcc

SEQ ID NO: 433 - RNA, 19 nt, synthetic construct
  source 1..19: mol_type = other RNA
tccgtgtctaccagattcn

SEQ ID NO: 434 - RNA, 19 nt, synthetic construct
  source 1..19: mol_type = other RNA
nccgtgtctaccagattcn

SEQ ID NO: 435 - RNA, 19 nt, synthetic construct
  modified_base 14: mod_base = i
  source 1..19: mol_type = other RNA
tccgtgtctaccanattca

SEQ ID NO: 436 - RNA, 19 nt, synthetic construct
  modified_base 14: mod_base = i
  source 1..19: mol_type = other RNA
tccgtgtctaccanattct

SEQ ID NO: 437 - RNA, 19 nt, synthetic construct
  modified_base 14: mod_base = i
  source 1..19: mol_type = other RNA
tccgtgtctaccanattcc

SEQ ID NO: 438 - RNA, 19 nt, synthetic construct
  modified_base 14: mod_base = i
  source 1..19: mol_type = other RNA
tccgtgtctaccanattcn

SEQ ID NO: 439 - RNA, 19 nt, synthetic construct
  modified_base 14: mod_base = i
  source 1..19: mol_type = other RNA
nccgtgtctaccanattcn

SEQ ID NO: 440 - RNA, 19 nt, synthetic construct
  source 1..19: mol_type = other RNA
cgtgtctaccagattccta

SEQ ID NO: 441 - RNA, 19 nt, synthetic construct
  source 1..19: mol_type = other RNA
cgtgtctaccagattcctt

SEQ ID NO: 442 - RNA, 19 nt, synthetic construct
  source 1..19: mol_type = other RNA
cgtgtctaccagattcctg

SEQ ID NO: 443 - RNA, 19 nt, synthetic construct
  source 1..19: mol_type = other RNA
cgtgtctaccagattcctn

SEQ ID NO: 444 - RNA, 19 nt, synthetic construct
  source 1..19: mol_type = other RNA
ngtgtctaccagattcctn

SEQ ID NO: 445 - RNA, 19 nt, synthetic construct
  source 1..19: mol_type = other RNA
caccttctcctgtagctta

SEQ ID NO: 446 - RNA, 19 nt, synthetic construct
  source 1..19: mol_type = other RNA
caccttctcctgtagcttt

SEQ ID NO: 447 - RNA, 19 nt, synthetic construct
  source 1..19: mol_type = other RNA
caccttctcctgtagcttc

SEQ ID NO: 448 - RNA, 19 nt, synthetic construct
  source 1..19: mol_type = other RNA
caccttctcctgtagcttn

SEQ ID NO: 449 - RNA, 19 nt, synthetic construct
  source 1..19: mol_type = other RNA
naccttctcctgtagcttn

SEQ ID NO: 450 - RNA, 19 nt, synthetic construct
  modified_base 15: mod_base = i
  source 1..19: mol_type = other RNA
caccttctcctgtanctta

SEQ ID NO: 451 - RNA, 19 nt, synthetic construct
  modified_base 15: mod_base = i
  source 1..19: mol_type = other RNA
caccttctcctgtancttt

SEQ ID NO: 452 - RNA, 19 nt, synthetic construct
  modified_base 15: mod_base = i
  source 1..19: mol_type = other RNA
caccttctcctgtancttc

SEQ ID NO: 453 - RNA, 19 nt, synthetic construct
  modified_base 15: mod_base = i
  source 1..19: mol_type = other RNA
caccttctcctgtancttn

SEQ ID NO: 454 - RNA, 19 nt, synthetic construct
  modified_base 15: mod_base = i
  source 1..19: mol_type = other RNA
naccttctcctgtancttn

SEQ ID NO: 455 - RNA, 19 nt, synthetic construct
  source 1..19: mol_type = other RNA
cctcaaatccactggatga

SEQ ID NO: 456 - RNA, 19 nt, synthetic construct
  source 1..19: mol_type = other RNA
cctcaaatccactggatgt

SEQ ID NO: 457 - RNA, 19 nt, synthetic construct
  source 1..19: mol_type = other RNA
cctcaaatccactggatgn

SEQ ID NO: 458 - RNA, 19 nt, synthetic construct
  source 1..19: mol_type = other RNA
nctcaaatccactggatgn

SEQ ID NO: 459 - RNA, 19 nt, synthetic construct
  modified_base 14: mod_base = i
  source 1..19: mol_type = other RNA
cctcaaatccactngatga

SEQ ID NO: 460 - RNA, 19 nt, synthetic construct
  modified_base 14: mod_base = i
  source 1..19: mol_type = other RNA
cctcaaatccactngatgt

SEQ ID NO: 461 - RNA, 19 nt, synthetic construct
  modified_base 14: mod_base = i
  source 1..19: mol_type = other RNA
cctcaaatccactngatgn

SEQ ID NO: 462 - RNA, 19 nt, synthetic construct
  modified_base 14: mod_base = i
  source 1..19: mol_type = other RNA
nctcaaatccactngatgn

SEQ ID NO: 463 - RNA, 19 nt, synthetic construct
  source 1..19: mol_type = other RNA
tagattctgcctctgaact

SEQ ID NO: 464 - RNA, 19 nt, synthetic construct
  source 1..19: mol_type = other RNA
tagattctgcctctgaaca

SEQ ID NO: 465 - RNA, 19 nt, synthetic construct
  source 1..19: mol_type = other RNA
tagattctgcctctgaacn

SEQ ID NO: 466 - RNA, 19 nt, synthetic construct
  source 1..19: mol_type = other RNA
nagattctgcctctgaacn

SEQ ID NO: 467 - RNA, 19 nt, synthetic construct
  modified_base 15: mod_base = i
  source 1..19: mol_type = other RNA
tagattctgcctctnaact

SEQ ID NO: 468 - RNA, 19 nt, synthetic construct
  modified_base 15: mod_base = i
  source 1..19: mol_type = other RNA
tagattctgcctctnaaca

SEQ ID NO: 469 - RNA, 19 nt, synthetic construct
  modified_base 15: mod_base = i
  source 1..19: mol_type = other RNA
tagattctgcctctnaacn

SEQ ID NO: 470 - RNA, 19 nt, synthetic construct
  modified_base 15: mod_base = i
  source 1..19: mol_type = other RNA
nagattctgcctctnaacn

SEQ ID NO: 471 - RNA, 19 nt, synthetic construct
  source 1..19: mol_type = other RNA
gattctgcctctgaactca

SEQ ID NO: 472 - RNA, 19 nt, synthetic construct
  source 1..19: mol_type = other RNA
gattctgcctctgaactct

SEQ ID NO: 473 - RNA, 19 nt, synthetic construct
  source 1..19: mol_type = other RNA
gattctgcctctgaactcn

SEQ ID NO: 474 - RNA, 19 nt, synthetic construct
  source 1..19: mol_type = other RNA
nattctgcctctgaactcn

SEQ ID NO: 475 - RNA, 19 nt, synthetic construct
  source 1..19: mol_type = other RNA
ctggtgttcccaataaggt

SEQ ID NO: 476 - RNA, 19 nt, synthetic construct
  source 1..19: mol_type = other RNA
ctggtgttcccaataagga

SEQ ID NO: 477 - RNA, 19 nt, synthetic construct
  source 1..19: mol_type = other RNA
ctggtgttcccaataaggn

SEQ ID NO: 478 - RNA, 19 nt, synthetic construct
  source 1..19: mol_type = other RNA
ntggtgttcccaataaggn

SEQ ID NO: 479 - RNA, 19 nt, synthetic construct
  source 1..19: mol_type = other RNA
ggtgttcccaataaggtga

SEQ ID NO: 480 - RNA, 19 nt, synthetic construct
  source 1..19: mol_type = other RNA
ggtgttcccaataaggtgt

SEQ ID NO: 481 - RNA, 19 nt, synthetic construct
  source 1..19: mol_type = other RNA
ggtgttcccaataaggtgg

SEQ ID NO: 482 - RNA, 19 nt, synthetic construct
  source 1..19: mol_type = other RNA
ggtgttcccaataaggtgn

SEQ ID NO: 483 - RNA, 19 nt, synthetic construct
  source 1..19: mol_type = other RNA
ngtgttcccaataaggtgn

SEQ ID NO: 484 - RNA, 19 nt, synthetic construct
  modified_base 15: mod_base = i
  source 1..19: mol_type = other RNA
ggtgttcccaataangtga

SEQ ID NO: 485 - RNA, 19 nt, synthetic construct
  modified_base 15: mod_base = i
  source 1..19: mol_type = other RNA
ggtgttcccaataangtgt

SEQ ID NO: 486 - RNA, 19 nt, synthetic construct
  modified_base 15: mod_base = i
  source 1..19: mol_type = other RNA
ggtgttcccaataangtgg

SEQ ID NO: 487 - RNA, 19 nt, synthetic construct
  modified_base 15: mod_base = i
  source 1..19: mol_type = other RNA
ggtgttcccaataangtgn

SEQ ID NO: 488 - RNA, 19 nt, synthetic construct
  modified_base 15: mod_base = i
  source 1..19: mol_type = other RNA
ngtgttcccaataangtgn

SEQ ID NO: 489 - RNA, 19 nt, synthetic construct
  source 1..19: mol_type = other RNA
ttagctggcacttggatga

SEQ ID NO: 490 - RNA, 19 nt, synthetic construct
  source 1..19: mol_type = other RNA
ttagctggcacttggatgt

SEQ ID NO: 491 - RNA, 19 nt, synthetic construct
  source 1..19: mol_type = other RNA
ttagctggcacttggatgg

SEQ ID NO: 492 - RNA, 19 nt, synthetic construct
  source 1..19: mol_type = other RNA
ttagctggcacttggatgn

SEQ ID NO: 493 - RNA, 19 nt, synthetic construct
  source 1..19: mol_type = other RNA
ntagctggcacttggatgn

SEQ ID NO: 494 - RNA, 19 nt, synthetic construct
  modified_base 14: mod_base = i
  source 1..19: mol_type = other RNA
ttagctggcacttngatga

SEQ ID NO: 495 - RNA, 19 nt, synthetic construct
  modified_base 14: mod_base = i
  source 1..19: mol_type = other RNA
ttagctggcacttngatgt

SEQ ID NO: 496 - RNA, 19 nt, synthetic construct
  modified_base 14: mod_base = i
  source 1..19: mol_type = other RNA
ttagctggcacttngatgg

SEQ ID NO: 497 - RNA, 19 nt, synthetic construct
  modified_base 14: mod_base = i
  source 1..19: mol_type = other RNA
ttagctggcacttngatgn

SEQ ID NO: 498 - RNA, 19 nt, synthetic construct
  modified_base 14: mod_base = i
  source 1..19: mol_type = other RNA
ntagctggcacttngatgn

SEQ ID NO: 499 - RNA, 19 nt, synthetic construct
  source 1..19: mol_type = other RNA
taatgagaagggagtatct

SEQ ID NO: 500 - RNA, 19 nt, synthetic construct
  source 1..19: mol_type = other RNA
taatgagaagggagtatca

SEQ ID NO: 501 - RNA, 19 nt, synthetic construct
  source 1..19: mol_type = other RNA
taatgagaagggagtatcn

SEQ ID NO: 502 - RNA, 19 nt, synthetic construct
  source 1..19: mol_type = other RNA
naatgagaagggagtatcn

SEQ ID NO: 503 - RNA, 19 nt, synthetic construct
  modified_base 14: mod_base = i
  source 1..19: mol_type = other RNA
taatgagaagggantatct

SEQ ID NO: 504 - RNA, 19 nt, synthetic construct
  modified_base 14: mod_base = i
  source 1..19: mol_type = other RNA
taatgagaagggantatca

SEQ ID NO: 505 - RNA, 19 nt, synthetic construct
  modified_base 14: mod_base = i
  source 1..19: mol_type = other RNA
taatgagaagggantatcn

SEQ ID NO: 506 - RNA, 19 nt, synthetic construct
  modified_base 14: mod_base = i
  source 1..19: mol_type = other RNA
naatgagaagggantatcn

SEQ ID NO: 507 - RNA, 19 nt, synthetic construct
  source 1..19: mol_type = other RNA
gagaagggagtatctgtga

SEQ ID NO: 508 - RNA, 19 nt, synthetic construct
  source 1..19: mol_type = other RNA
gagaagggagtatctgtgt

SEQ ID NO: 509 - RNA, 19 nt, synthetic construct
  source 1..19: mol_type = other RNA
gagaagggagtatctgtgn

SEQ ID NO: 510 - RNA, 19 nt, synthetic construct
  source 1..19: mol_type = other RNA
nagaagggagtatctgtgn

SEQ ID NO: 511 - RNA, 19 nt, synthetic construct
  modified_base 16: mod_base = i
  source 1..19: mol_type = other RNA
gagaagggagtatctntga

SEQ ID NO: 512 - RNA, 19 nt, synthetic construct
  modified_base 16: mod_base = i
  source 1..19: mol_type = other RNA
gagaagggagtatctntgt

SEQ ID NO: 513 - RNA, 19 nt, synthetic construct
  modified_base 16: mod_base = i
  source 1..19: mol_type = other RNA
gagaagggagtatctntgn

SEQ ID NO: 514 - RNA, 19 nt, synthetic construct
  modified_base 16: mod_base = i
  source 1..19: mol_type = other RNA
nagaagggagtatctntgn

SEQ ID NO: 515 - RNA, 19 nt, synthetic construct
  source 1..19: mol_type = other RNA
gcatcagcatcatcgaaca

SEQ ID NO: 516 - RNA, 19 nt, synthetic construct
  source 1..19: mol_type = other RNA
gcatcagcatcatcgaact

SEQ ID NO: 517 - RNA, 19 nt, synthetic construct
  source 1..19: mol_type = other RNA
gcatcagcatcatcgaacc

SEQ ID NO: 518 - RNA, 19 nt, synthetic construct
  source 1..19: mol_type = other RNA
gcatcagcatcatcgaacn

SEQ ID NO: 519 - RNA, 19 nt, synthetic construct
  source 1..19: mol_type = other RNA
ncatcagcatcatcgaacn

SEQ ID NO: 520 - RNA, 19 nt, synthetic construct
  modified_base 15: mod_base = i
  source 1..19: mol_type = other RNA
gcatcagcatcatcnaaca

SEQ ID NO: 521 - RNA, 19 nt, synthetic construct
  modified_base 15: mod_base = i
  source 1..19: mol_type = other RNA
gcatcagcatcatcnaact

SEQ ID NO: 522 - RNA, 19 nt, synthetic construct
  modified_base 15: mod_base = i
  source 1..19: mol_type = other RNA
gcatcagcatcatcnaacc

SEQ ID NO: 523 - RNA, 19 nt, synthetic construct
  modified_base 15: mod_base = i
  source 1..19: mol_type = other RNA
gcatcagcatcatcnaacn

SEQ ID NO: 524 - RNA, 19 nt, synthetic construct
  modified_base 15: mod_base = i
  source 1..19: mol_type = other RNA
ncatcagcatcatcnaacn

SEQ ID NO: 525 - RNA, 19 nt, synthetic construct
  source 1..19: mol_type = other RNA
tgaacaggaatggaaaggt

SEQ ID NO: 526 - RNA, 19 nt, synthetic construct
  source 1..19: mol_type = other RNA
tgaacaggaatggaaagga

SEQ ID NO: 527 - RNA, 19 nt, synthetic construct
  source 1..19: mol_type = other RNA
tgaacaggaatggaaaggn

SEQ ID NO: 528 - RNA, 19 nt, synthetic construct
  source 1..19: mol_type = other RNA
ngaacaggaatggaaaggn

SEQ ID NO: 529 - RNA, 19 nt, synthetic construct
  source 1..19: mol_type = other RNA
ctaccgagtccgtgtctaa

SEQ ID NO: 530 - RNA, 19 nt, synthetic construct
  source 1..19: mol_type = other RNA
ctaccgagtccgtgtctat

SEQ ID NO: 531 - RNA, 19 nt, synthetic construct
  source 1..19: mol_type = other RNA
ctaccgagtccgtgtctan

SEQ ID NO: 532 - RNA, 19 nt, synthetic construct
  source 1..19: mol_type = other RNA
ntaccgagtccgtgtctan

SEQ ID NO: 533 - RNA, 19 nt, synthetic construct
  source 1..19: mol_type = other RNA
tgggaagccagaaattgta

SEQ ID NO: 534 - RNA, 19 nt, synthetic construct
  source 1..19: mol_type = other RNA
tgggaagccagaaattgtt

SEQ ID NO: 535 - RNA, 19 nt, synthetic construct
  source 1..19: mol_type = other RNA
tgggaagccagaaattgtn

SEQ ID NO: 536 - RNA, 19 nt, synthetic construct
  source 1..19: mol_type = other RNA
ngggaagccagaaattgtn

SEQ ID NO: 537 - RNA, 19 nt, synthetic construct
  source 1..19: mol_type = other RNA
cctaatgagaagggagtaa

SEQ ID NO: 538 - RNA, 19 nt, synthetic construct
  source 1..19: mol_type = other RNA
cctaatgagaagggagtat

SEQ ID NO: 539 - RNA, 19 nt, synthetic construct
  source 1..19: mol_type = other RNA
cctaatgagaagggagtan

SEQ ID NO: 540 - RNA, 19 nt, synthetic construct
  source 1..19: mol_type = other RNA
nctaatgagaagggagtan

SEQ ID NO: 541 - RNA, 21 nt, synthetic construct
  source 1..21: mol_type = other RNA
ttgtgttcagtttccattccg

SEQ ID NO: 542 - RNA, 21 nt, synthetic construct
  source 1..21: mol_type = other RNA
ttgtgttcagtttccattccg

SEQ ID NO: 543 - RNA, 21 nt, synthetic construct
  modified_base 1: mod_base = um
  modified_base 1^2: mod_base = OTHER; note = phosphorothioate linkage
  modified_base 2: mod_base = OTHER; note = 2'-fluorocytidine
  modified_base 2^3: mod_base = OTHER; note = phosphorothioate linkage
  modified_base 3: mod_base = um
  modified_base 3^4: mod_base = OTHER; note = phosphorothioate linkage
  modified_base 4: mod_base = OTHER; note = 2'-fluoroguanosine
  modified_base 5: mod_base = um
  modified_base 6: mod_base = OTHER; note = 2'-fluoroguanosine
  modified_base 7: mod_base = um
  modified_base 8: mod_base = OTHER; note = 2'-fluorouridine
  modified_base 9: mod_base = cm
  modified_base 10: mod_base = OTHER; note = 2'-fluoroadenosine
  modified_base 11: mod_base = gm
  modified_base 12: mod_base = OTHER; note = 2'-fluorouridine
  modified_base 13: mod_base = um
  modified_base 14: mod_base = OTHER; note = 2'-fluorouridine
  modified_base 15: mod_base = cm
  modified_base 16: mod_base = OTHER; note = 2'-fluorocytidine
  modified_base 17: mod_base = OTHER; note = 2'-O-methyladenosine
  modified_base 18: mod_base = OTHER; note = 2'-fluorouridine
  modified_base 19: mod_base = um
  modified_base 20: mod_base = OTHER; note = 2'-fluorocytidine
  modified_base 20^21: mod_base = OTHER; note = phosphorothioate linkage
  modified_base 21: mod_base = cm
  source 1..21: mol_type = other RNA
tctgtgttcagtttccattcc

SEQ ID NO: 544 - RNA, 21 nt, synthetic construct
  modified_base 1: mod_base = OTHER; note = 5 -cyclopropyl phosphonate-2 -O-methyluridine
  modified_base 1^2: mod_base = OTHER; note = phosphorothioate linkage
  modified_base 2: mod_base = OTHER; note = 2'-fluorocytidine
  modified_base 2^3: mod_base = OTHER; note = phosphorothioate linkage
  modified_base 3: mod_base = um
  modified_base 3^4: mod_base = OTHER; note = phosphorothioate linkage
  modified_base 4: mod_base = OTHER; note = 2'-fluoroguanosine
  modified_base 5: mod_base = um
  modified_base 6: mod_base = OTHER; note = 2'-fluoroguanosine
  modified_base 7: mod_base = um
  modified_base 8: mod_base = OTHER; note = 2'-fluorouridine
  modified_base 9: mod_base = cm
  modified_base 10: mod_base = OTHER; note = 2'-fluoroadenosine
  modified_base 11: mod_base = gm
  modified_base 12: mod_base = OTHER; note = 2'-fluorouridine
  modified_base 13: mod_base = um
  modified_base 14: mod_base = OTHER; note = 2'-fluorouridine
  modified_base 15: mod_base = cm
  modified_base 16: mod_base = OTHER; note = 2'-fluorocytidine
  modified_base 17: mod_base = OTHER; note = 2'-O-methyladenosine
  modified_base 18: mod_base = OTHER; note = 2'-fluorouridine
  modified_base 19: mod_base = um
  modified_base 20: mod_base = OTHER; note = 2'-fluorocytidine
  modified_base 20^21: mod_base = OTHER; note = phosphorothioate linkage
  modified_base 21: mod_base = cm
  source 1..21: mol_type = other RNA
tctgtgttcagtttccattcc

SEQ ID NO: 545 - RNA, 21 nt, synthetic construct
  modified_base 1: mod_base = um
  modified_base 1^2: mod_base = OTHER; note = phosphorothioate linkage
  modified_base 2: mod_base = OTHER; note = 2'-fluorouridine
  modified_base 2^3: mod_base = OTHER; note = phosphorothioate linkage
  modified_base 3: mod_base = gm
  modified_base 3^4: mod_base = OTHER; note = phosphorothioate linkage
  modified_base 4: mod_base = OTHER; note = 2'-fluoroguanosine
  modified_base 5: mod_base = cm
  modified_base 6: mod_base = OTHER; note = 2'-fluorouridine
  modified_base 7: mod_base = um
  modified_base 8: mod_base = OTHER; note = 2'-fluorocytidine
  modified_base 9: mod_base = cm
  modified_base 10: mod_base = OTHER; note = 2'-fluorocytidine
  modified_base 11: mod_base = OTHER; note = 2'-O-methyladenosine
  modified_base 12: mod_base = OTHER; note = 2'-fluoroguanosine
  modified_base 13: mod_base = gm
  modified_base 14: mod_base = OTHER; note = 2'-fluoroadenosine
  modified_base 15: mod_base = OTHER; note = 2'-O-methyladenosine
  modified_base 16: mod_base = OTHER; note = 2'-fluorouridine
  modified_base 17: mod_base = cm
  modified_base 18: mod_base = OTHER; note = 2'-fluorouridine
  modified_base 19: mod_base = gm
  modified_base 20: mod_base = OTHER; note = 2'-fluoroguanosine
  modified_base 20^21: mod_base = OTHER; note = phosphorothioate linkage
  modified_base 21: mod_base = um
  source 1..21: mol_type = other RNA
ttggcttcccaggaatctggt

SEQ ID NO: 546 - RNA, 21 nt, synthetic construct
  modified_base 1: mod_base = OTHER; note = 5 -cyclopropyl phosphonate-2 -O-methyluridine
  modified_base 1^2: mod_base = OTHER; note = phosphorothioate linkage
  modified_base 2: mod_base = OTHER; note = 2'-fluorouridine
  modified_base 2^3: mod_base = OTHER; note = phosphorothioate linkage
  modified_base 3: mod_base = gm
  modified_base 3^4: mod_base = OTHER; note = phosphorothioate linkage
  modified_base 4: mod_base = OTHER; note = 2'-fluoroguanosine
  modified_base 5: mod_base = cm
  modified_base 6: mod_base = OTHER; note = 2'-fluorouridine
  modified_base 7: mod_base = um
  modified_base 8: mod_base = OTHER; note = 2'-fluorocytidine
  modified_base 9: mod_base = cm
  modified_base 10: mod_base = OTHER; note = 2'-fluorocytidine
  modified_base 11: mod_base = OTHER; note = 2'-O-methyladenosine
  modified_base 12: mod_base = OTHER; note = 2'-fluoroguanosine
  modified_base 13: mod_base = gm
  modified_base 14: mod_base = OTHER; note = 2'-fluoroadenosine
  modified_base 15: mod_base = OTHER; note = 2'-O-methyladenosine
  modified_base 16: mod_base = OTHER; note = 2'-fluorouridine
  modified_base 17: mod_base = cm
  modified_base 18: mod_base = OTHER; note = 2'-fluorouridine
  modified_base 19: mod_base = gm
  modified_base 20: mod_base = OTHER; note = 2'-fluoroguanosine
  modified_base 20^21: mod_base = OTHER; note = phosphorothioate linkage
  modified_base 21: mod_base = um
  source 1..21: mol_type = other RNA
ttggcttcccaggaatctggt

SEQ ID NO: 547 - RNA, 21 nt, synthetic construct
  modified_base 1: mod_base = OTHER; note = 2'-O-methyladenosine
  modified_base 1^2: mod_base = OTHER; note = phosphorothioate linkage
  modified_base 2: mod_base = OTHER; note = 2'-fluorocytidine
  modified_base 2^3: mod_base = OTHER; note = phosphorothioate linkage
  modified_base 3: mod_base = OTHER; note = 2'-O-methyladenosine
  modified_base 3^4: mod_base = OTHER; note = phosphorothioate linkage
  modified_base 4: mod_base = OTHER; note = 2'-fluoroadenosine
  modified_base 5: mod_base = um
  modified_base 6: mod_base = OTHER; note = 2'-fluorouridine
  modified_base 7: mod_base = um
  modified_base 8: mod_base = OTHER; note = 2'-fluorocytidine
  modified_base 9: mod_base = um
  modified_base 10: mod_base = OTHER; note = 2'-fluoroguanosine
  modified_base 11: mod_base = gm
  modified_base 12: mod_base = OTHER; note = 2'-fluorocytidine
  modified_base 13: mod_base = um
  modified_base 14: mod_base = OTHER; note = 2'-fluorouridine
  modified_base 15: mod_base = cm
  modified_base 16: mod_base = OTHER; note = 2'-fluorocytidine
  modified_base 17: mod_base = cm
  modified_base 18: mod_base = OTHER; note = 2'-fluoroadenosine
  modified_base 19: mod_base = gm
  modified_base 20: mod_base = OTHER; note = 2'-fluoroguanosine
  modified_base 20^21: mod_base = OTHER; note = phosphorothioate linkage
  modified_base 21: mod_base = OTHER; note = 2'-O-methyladenosine
  source 1..21: mol_type = other RNA
acaatttctggcttcccagga

SEQ ID NO: 548 - RNA, 22 nt, synthetic construct
  modified_base 1: mod_base = OTHER; note = 5'-cyclopropyl phosphonate-2'-O-methyladenosine
  modified_base 1^2: mod_base = OTHER; note = phosphorothioate linkage
  modified_base 2: mod_base = OTHER; note = 2'-fluorocytidine
  modified_base 2^3: mod_base = OTHER; note = phosphorothioate linkage
  modified_base 3: mod_base = OTHER; note = 2'-O-methyladenosine
  modified_base 3^4: mod_base = OTHER; note = phosphorothioate linkage
  modified_base 4: mod_base = OTHER; note = 2'-fluoroadenosine
  modified_base 5: mod_base = um
  modified_base 6: mod_base = OTHER; note = 2'-fluorouridine
  modified_base 7: mod_base = um
  modified_base 8: mod_base = OTHER; note = 2'-fluorocytidine
  modified_base 9: mod_base = um
  modified_base 10: mod_base = OTHER; note = 2'-fluoroguanosine
  modified_base 11: mod_base = gm
  modified_base 12: mod_base = OTHER; note = 2'-fluorocytidine
  modified_base 13: mod_base = um
  modified_base 14: mod_base = OTHER; note = 2'-fluorouridine
  modified_base 15: mod_base = cm
  modified_base 16: mod_base = OTHER; note = 2'-fluorocytidine
  modified_base 17: mod_base = cm
  modified_base 18: mod_base = OTHER; note = 2'-fluoroadenosine
  modified_base 19: mod_base = gm
  modified_base 20: mod_base = OTHER; note = 2'-fluoroguanosine
  modified_base 20^21: mod_base = OTHER; note = phosphorothioate linkage
  modified_base 21: mod_base = OTHER; note = 2'-O-methyladenosine
  source 1..22: mol_type = other RNA
cacaatttctggcttcccagga

SEQ ID NO: 549 - RNA, 21 nt, synthetic construct
  modified_base 1: mod_base = um
  modified_base 1^2: mod_base = OTHER; note = phosphorothioate linkage
  modified_base 2: mod_base = OTHER; note = 2'-fluorouridine
  modified_base 2^3: mod_base = OTHER; note = phosphorothioate linkage
  modified_base 3: mod_base = OTHER; note = 2'-O-methyladenosine
  modified_base 3^4: mod_base = OTHER; note = phosphorothioate linkage
  modified_base 4: mod_base = OTHER; note = 2'-fluorocytidine
  modified_base 5: mod_base = OTHER; note = 2'-O-methyladenosine
  modified_base 6: mod_base = OTHER; note = 2'-fluorocytidine
  modified_base 7: mod_base = um
  modified_base 8: mod_base = OTHER; note = 2'-fluorouridine
  modified_base 9: mod_base = cm
  modified_base 10: mod_base = OTHER; note = 2'-fluoroadenosine
  modified_base 11: mod_base = gm
  modified_base 12: mod_base = OTHER; note = 2'-fluorocytidine
  modified_base 13: mod_base = OTHER; note = 2'-O-methyladenosine
  modified_base 14: mod_base = OTHER; note = 2'-fluorocytidine
  modified_base 15: mod_base = cm
  modified_base 16: mod_base = OTHER; note = 2'-fluoroadenosine
  modified_base 17: mod_base = gm
  modified_base 18: mod_base = OTHER; note = 2'-fluorouridine
  modified_base 19: mod_base = gm
  modified_base 20: mod_base = OTHER; note = 2'-fluoroguanosine
  modified_base 20^21: mod_base = OTHER; note = phosphorothioate linkage
  modified_base 21: mod_base = cm
  source 1..21: mol_type = other RNA
ttacacttcagcaccagtggc

SEQ ID NO: 550 - RNA, 21 nt, synthetic construct
  modified_base 1: mod_base = um
  modified_base 1^2: mod_base = OTHER; note = phosphorothioate linkage
  modified_base 2: mod_base = OTHER; note = 2'-fluoroadenosine
  modified_base 2^3: mod_base = OTHER; note = phosphorothioate linkage
  modified_base 3: mod_base = cm
  modified_base 3^4: mod_base = OTHER; note = phosphorothioate linkage
  modified_base 4: mod_base = OTHER; note = 2'-fluorocytidine
  modified_base 5: mod_base = um
  modified_base 6: mod_base = OTHER; note = 2'-fluorouridine
  modified_base 7: mod_base = cm
  modified_base 8: mod_base = OTHER; note = 2'-fluorocytidine
  modified_base 9: mod_base = OTHER; note = 2'-O-methyladenosine
  modified_base 10: mod_base = OTHER; note = 2'-fluoroadenosine
  modified_base 11: mod_base = gm
  modified_base 12: mod_base = OTHER; note = 2'-fluorocytidine
  modified_base 13: mod_base = um
  modified_base 14: mod_base = OTHER; note = 2'-fluorouridine
  modified_base 15: mod_base = cm
  modified_base 16: mod_base = OTHER; note = 2'-fluorouridine
  modified_base 17: mod_base = gm
  modified_base 18: mod_base = OTHER; note = 2'-fluorouridine
  modified_base 19: mod_base = cm
  modified_base 20: mod_base = OTHER; note = 2'-fluorocytidine
  modified_base 20^21: mod_base = OTHER; note = phosphorothioate linkage
  modified_base 21: mod_base = gm
  source 1..21: mol_type = other RNA
taccttccaagcttctgtccg

SEQ ID NO: 551 - RNA, 21 nt, synthetic construct
  modified_base 1: mod_base = um
  modified_base 1^2: mod_base = OTHER; note = phosphorothioate linkage
  modified_base 2: mod_base = OTHER; note = 2'-fluorocytidine
  modified_base 2^3: mod_base = OTHER; note = phosphorothioate linkage
  modified_base 3: mod_base = gm
  modified_base 3^4: mod_base = OTHER; note = phosphorothioate linkage
  modified_base 4: mod_base = OTHER; note = 2'-fluoroguanosine
  modified_base 5: mod_base = OTHER; note = 2'-O-methyladenosine
  modified_base 6: mod_base = OTHER; note = 2'-fluoroadenosine
  modified_base 7: mod_base = OTHER; note = 2'-O-methyladenosine
  modified_base 8: mod_base = OTHER; note = 2'-fluoroadenosine
  modified_base 9: mod_base = um
  modified_base 10: mod_base = OTHER; note = 2'-fluorocytidine
  modified_base 11: mod_base = cm
  modified_base 12: mod_base = OTHER; note = 2'-fluorocytidine
  modified_base 13: mod_base = cm
  modified_base 14: mod_base = OTHER; note = 2'-fluorouridine
  modified_base 15: mod_base = cm
  modified_base 16: mod_base = OTHER; note = 2'-fluoroadenosine
  modified_base 17: mod_base = um
  modified_base 18: mod_base = OTHER; note = 2'-fluorocytidine
  modified_base 19: mod_base = cm
  modified_base 20: mod_base = OTHER; note = 2'-fluorouridine
  modified_base 20^21: mod_base = OTHER; note = phosphorothioate linkage
  modified_base 21: mod_base = gm
  source 1..21: mol_type = other RNA
tcggaaaatcccctcatcctg

SEQ ID NO: 552 - RNA, 21 nt, synthetic construct
  modified_base 1: mod_base = um
  modified_base 1^2: mod_base = OTHER; note = phosphorothioate linkage
  modified_base 2: mod_base = OTHER; note = 2'-fluorouridine
  modified_base 2^3: mod_base = OTHER; note = phosphorothioate linkage
  modified_base 3: mod_base = um
  modified_base 3^4: mod_base = OTHER; note = phosphorothioate linkage
  modified_base 4: mod_base = OTHER; note = 2'-fluorocytidine
  modified_base 5: mod_base = um
  modified_base 6: mod_base = OTHER; note = 2'-fluoroguanosine
  modified_base 7: mod_base = gm
  modified_base 8: mod_base = OTHER; note = 2'-fluorocytidine
  modified_base 9: mod_base = um
  modified_base 10: mod_base = OTHER; note = 2'-fluorouridine
  modified_base 11: mod_base = cm
  modified_base 12: mod_base = OTHER; note = 2'-fluorocytidine
  modified_base 13: mod_base = cm
  modified_base 14: mod_base = OTHER; note = 2'-fluoroadenosine
  modified_base 15: mod_base = gm
  modified_base 16: mod_base = OTHER; note = 2'-fluoroguanosine
  modified_base 17: mod_base = OTHER; note = 2'-O-methyladenosine
  modified_base 18: mod_base = OTHER; note = 2'-fluoroadenosine
  modified_base 19: mod_base = um
  modified_base 20: mod_base = OTHER; note = 2'-fluorocytidine
  modified_base 20^21: mod_base = OTHER; note = phosphorothioate linkage
  modified_base 21: mod_base = um
  source 1..21: mol_type = other RNA
tttctggcttcccaggaatct

SEQ ID NO: 553 - RNA, 21 nt, synthetic construct
  modified_base 1: mod_base = um
  modified_base 1^2: mod_base = OTHER; note = phosphorothioate linkage
  modified_base 2: mod_base = OTHER; note = 2'-fluorouridine
  modified_base 2^3: mod_base = OTHER; note = phosphorothioate linkage
  modified_base 3: mod_base = gm
  modified_base 3^4: mod_base = OTHER; note = phosphorothioate linkage
  modified_base 4: mod_base = OTHER; note = 2'-fluoroadenosine
  modified_base 5: mod_base = gm
  modified_base 6: mod_base = OTHER; note = 2'-fluorouridine
  modified_base 7: mod_base = um
  modified_base 8: mod_base = OTHER; note = 2'-fluorocytidine
  modified_base 9: mod_base = OTHER; note = 2'-O-methyladenosine
  modified_base 10: mod_base = OTHER; note = 2'-fluoroguanosine
  modified_base 11: mod_base = OTHER; note = 2'-O-methyladenosine
  modified_base 12: mod_base = OTHER; note = 2'-fluoroguanosine
  modified_base 13: mod_base = gm
  modified_base 14: mod_base = OTHER; note = 2'-fluorocytidine
  modified_base 15: mod_base = OTHER; note = 2'-O-methyladenosine
  modified_base 16: mod_base = OTHER; note = 2'-fluoroguanosine
  modified_base 17: mod_base = OTHER; note = 2'-O-methyladenosine
  modified_base 18: mod_base = OTHER; note = 2'-fluoroadenosine
  modified_base 19: mod_base = um
  modified_base 20: mod_base = OTHER; note = 2'-fluorocytidine
  modified_base 20^21: mod_base = OTHER; note = phosphorothioate linkage
  modified_base 21: mod_base = um
  source 1..21: mol_type = other RNA
ttgagttcagaggcagaatct

SEQ ID NO: 554 - RNA, 21 nt, synthetic construct
  modified_base 1: mod_base = um
  modified_base 1^2: mod_base = OTHER; note = phosphorothioate linkage
  modified_base 2: mod_base = OTHER; note = 2'-fluorocytidine
  modified_base 2^3: mod_base = OTHER; note = phosphorothioate linkage
  modified_base 3: mod_base = um
  modified_base 3^4: mod_base = OTHER; note = phosphorothioate linkage
  modified_base 4: mod_base = OTHER; note = 2'-fluoroadenosine
  modified_base 5: mod_base = OTHER; note = 2'-O-methyladenosine
  modified_base 6: mod_base = OTHER; note = 2'-fluoroguanosine
  modified_base 7: mod_base = OTHER; note = 2'-O-methyladenosine
  modified_base 8: mod_base = OTHER; note = 2'-fluoroguanosine
  modified_base 9: mod_base = um
  modified_base 10: mod_base = OTHER; note = 2'-fluorocytidine
  modified_base 11: mod_base = cm
  modified_base 12: mod_base = OTHER; note = 2'-fluorocytidine
  modified_base 13: mod_base = um
  modified_base 14: mod_base = OTHER; note = 2'-fluoroguanosine
  modified_base 15: mod_base = cm
  modified_base 16: mod_base = OTHER; note = 2'-fluoroadenosine
  modified_base 17: mod_base = gm
  modified_base 18: mod_base = OTHER; note = 2'-fluoroguanosine
  modified_base 19: mod_base = gm
  modified_base 20: mod_base = OTHER; note = 2'-fluorouridine
  modified_base 20^21: mod_base = OTHER; note = phosphorothioate linkage
  modified_base 21: mod_base = OTHER; note = 2'-O-methyladenosine
  source 1..21: mol_type = other RNA
tctaagagtccctgcagggta

SEQ ID NO: 555 - RNA, 21 nt, synthetic construct
  modified_base 1: mod_base = OTHER; note = 2'-O-methyladenosine
  modified_base 1^2: mod_base = OTHER; note = phosphorothioate linkage
  modified_base 2: mod_base = OTHER; note = 2'-fluoroguanosine
  modified_base 2^3: mod_base = OTHER; note = phosphorothioate linkage
  modified_base 3: mod_base = cm
  modified_base 3^4: mod_base = OTHER; note = phosphorothioate linkage
  modified_base 4: mod_base = OTHER; note = 2'-fluorouridine
  modified_base 5: mod_base = OTHER; note = 2'-O-methyladenosine
  modified_base 6: mod_base = OTHER; note = 2'-fluoroadenosine
  modified_base 7: mod_base = gm
  modified_base 8: mod_base = OTHER; note = 2'-fluoroadenosine
  modified_base 9: mod_base = gm
  modified_base 10: mod_base = OTHER; note = 2'-fluorouridine
  modified_base 11: mod_base = cm
  modified_base 12: mod_base = OTHER; note = 2'-fluorocytidine
  modified_base 13: mod_base = cm
  modified_base 14: mod_base = OTHER; note = 2'-fluorouridine
  modified_base 15: mod_base = gm
  modified_base 16: mod_base = OTHER; note = 2'-fluorocytidine
  modified_base 17: mod_base = OTHER; note = 2'-O-methyladenosine
  modified_base 18: mod_base = OTHER; note = 2'-fluoroguanosine
  modified_base 19: mod_base = gm
  modified_base 20: mod_base = OTHER; note = 2'-fluoroguanosine
  modified_base 20^21: mod_base = OTHER; note = phosphorothioate linkage
  modified_base 21: mod_base = um
  source 1..21: mol_type = other RNA
agctaagagtccctgcagggt

SEQ ID NO: 556 - RNA, 21 nt, synthetic construct
  modified_base 1: mod_base = OTHER; note = 2'-O-methyladenosine
  modified_base 1^2: mod_base = OTHER; note = phosphorothioate linkage
  modified_base 2: mod_base = OTHER; note = 2'-fluoroadenosine
  modified_base 2^3: mod_base = OTHER; note = phosphorothioate linkage
  modified_base 3: mod_base = gm
  modified_base 3^4: mod_base = OTHER; note = phosphorothioate linkage
  modified_base 4: mod_base = OTHER; note = 2'-fluorocytidine
  modified_base 5: mod_base = um
  modified_base 6: mod_base = OTHER; note = 2'-fluoroadenosine
  modified_base 7: mod_base = cm
  modified_base 8: mod_base = OTHER; note = 2'-fluoroadenosine
  modified_base 9: mod_base = gm
  modified_base 10: mod_base = OTHER; note = 2'-fluoroguanosine
  modified_base 11: mod_base = OTHER; note = 2'-O-methyladenosine
  modified_base 12: mod_base = OTHER; note = 2'-fluoroguanosine
  modified_base 13: mod_base = OTHER; note = 2'-O-methyladenosine
  modified_base 14: mod_base = OTHER; note = 2'-fluoroadenosine
  modified_base 15: mod_base = gm
  modified_base 16: mod_base = OTHER; note = 2'-fluoroguanosine
  modified_base 17: mod_base = um
  modified_base 18: mod_base = OTHER; note = 2'-fluoroguanosine
  modified_base 19: mod_base = gm
  modified_base 20: mod_base = OTHER; note = 2'-fluoroguanosine
  modified_base 20^21: mod_base = OTHER; note = phosphorothioate linkage
  modified_base 21: mod_base = OTHER; note = 2'-O-methyladenosine
  source 1..21: mol_type = other RNA
aagctacaggagaaggtggga

SEQ ID NO: 557 - RNA, 21 nt, synthetic construct
  modified_base 1: mod_base = um
  modified_base 1^2: mod_base = OTHER; note = phosphorothioate linkage
  modified_base 2: mod_base = OTHER; note = 2'-fluorocytidine
  modified_base 2^3: mod_base = OTHER; note = phosphorothioate linkage
  modified_base 3: mod_base = um
  modified_base 3^4: mod_base = OTHER; note = phosphorothioate linkage
  modified_base 4: mod_base = OTHER; note = 2'-fluoroguanosine
  modified_base 5: mod_base = OTHER; note = 2'-O-methyladenosine
  modified_base 6: mod_base = OTHER; note = 2'-fluoroadenosine
  modified_base 7: mod_base = gm
  modified_base 8: mod_base = OTHER; note = 2'-fluorocytidine
  modified_base 9: mod_base = um
  modified_base 10: mod_base = OTHER; note = 2'-fluoroadenosine
  modified_base 11: mod_base = cm
  modified_base 12: mod_base = OTHER; note = 2'-fluoroadenosine
  modified_base 13: mod_base = gm
  modified_base 14: mod_base = OTHER; note = 2'-fluoroguanosine
  modified_base 15: mod_base = OTHER; note = 2'-O-methyladenosine
  modified_base 16: mod_base = OTHER; note = 2'-fluoroguanosine
  modified_base 17: mod_base = OTHER; note = 2'-O-methyladenosine
  modified_base 18: mod_base = OTHER; note = 2'-fluoroadenosine
  modified_base 19: mod_base = gm
  modified_base 20: mod_base = OTHER; note = 2'-fluoroguanosine
  modified_base 20^21: mod_base = OTHER; note = phosphorothioate linkage
  modified_base 21: mod_base = um
  source 1..21: mol_type = other RNA
tctgaagctacaggagaaggt

SEQ ID NO: 558 - RNA, 21 nt, synthetic construct
  modified_base 1: mod_base = um
  modified_base 1^2: mod_base = OTHER; note = phosphorothioate linkage
  modified_base 2: mod_base = OTHER; note = 2'-fluoroadenosine
  modified_base 2^3: mod_base = OTHER; note = phosphorothioate linkage
  modified_base 3: mod_base = cm
  modified_base 3^4: mod_base = OTHER; note = phosphorothioate linkage
  modified_base 4: mod_base = OTHER; note = 2'-fluoroadenosine
  modified_base 5: mod_base = gm
  modified_base 6: mod_base = OTHER; note = 2'-fluoroadenosine
  modified_base 7: mod_base = cm
  modified_base 8: mod_base = OTHER; note = 2'-fluorouridine
  modified_base 9: mod_base = gm
  modified_base 10: mod_base = OTHER; note = 2'-fluoroadenosine
  modified_base 11: mod_base = gm
  modified_base 12: mod_base = OTHER; note = 2'-fluoroguanosine
  modified_base 13: mod_base = OTHER; note = 2'-O-methyladenosine
  modified_base 14: mod_base = OTHER; note = 2'-fluorocytidine
  modified_base 15: mod_base = cm
  modified_base 16: mod_base = OTHER; note = 2'-fluoroadenosine
  modified_base 17: mod_base = gm
  modified_base 18: mod_base = OTHER; note = 2'-fluorocytidine
  modified_base 19: mod_base = OTHER; note = 2'-O-methyladenosine
  modified_base 20: mod_base = OTHER; note = 2'-fluorocytidine
  modified_base 20^21: mod_base = OTHER; note = phosphorothioate linkage
  modified_base 21: mod_base = cm
  source 1..21: mol_type = other RNA
tacagactgaggaccagcacc

SEQ ID NO: 559 - RNA, 21 nt, synthetic construct
  modified_base 1: mod_base = um
  modified_base 1^2: mod_base = OTHER; note = phosphorothioate linkage
  modified_base 2: mod_base = OTHER; note = 2'-fluoroadenosine
  modified_base 2^3: mod_base = OTHER; note = phosphorothioate linkage
  modified_base 3: mod_base = cm
  modified_base 3^4: mod_base = OTHER; note = phosphorothioate linkage
  modified_base 4: mod_base = OTHER; note = 2'-fluoroadenosine
  modified_base 5: mod_base = gm
  modified_base 6: mod_base = OTHER; note = 2'-fluoroadenosine
  modified_base 7: mod_base = OTHER; note = 2 ,3 -seco-cytidine
  modified_base 8: mod_base = OTHER; note = 2'-fluorouridine
  modified_base 9: mod_base = gm
  modified_base 10: mod_base = OTHER; note = 2'-fluoroadenosine
  modified_base 11: mod_base = gm
  modified_base 12: mod_base = OTHER; note = 2'-fluoroguanosine
  modified_base 13: mod_base = OTHER; note = 2'-O-methyladenosine
  modified_base 14: mod_base = OTHER; note = 2'-fluorocytidine
  modified_base 15: mod_base = cm
  modified_base 16: mod_base = OTHER; note = 2'-fluoroadenosine
  modified_base 17: mod_base = gm
  modified_base 18: mod_base = OTHER; note = 2'-fluorocytidine
  modified_base 19: mod_base = OTHER; note = 2'-O-methyladenosine
  modified_base 20: mod_base = OTHER; note = 2'-fluorocytidine
  modified_base 20^21: mod_base = OTHER; note = phosphorothioate linkage
  modified_base 21: mod_base = cm
  source 1..21: mol_type = other RNA
tacagactgaggaccagcacc

SEQ ID NO: 560 - RNA, 21 nt, synthetic construct
  modified_base 1: mod_base = um
  modified_base 1^2: mod_base = OTHER; note = phosphorothioate linkage
  modified_base 2: mod_base = OTHER; note = 2'-fluorocytidine
  modified_base 2^3: mod_base = OTHER; note = phosphorothioate linkage
  modified_base 3: mod_base = OTHER; note = 2'-O-methyladenosine
  modified_base 3^4: mod_base = OTHER; note = phosphorothioate linkage
  modified_base 4: mod_base = OTHER; note = 2'-fluorocytidine
  modified_base 5: mod_base = OTHER; note = 2'-O-methyladenosine
  modified_base 6: mod_base = OTHER; note = 2'-fluoroguanosine
  modified_base 7: mod_base = OTHER; note = 2'-O-methyladenosine
  modified_base 8: mod_base = OTHER; note = 2'-fluorocytidine
  modified_base 9: mod_base = um
  modified_base 10: mod_base = OTHER; note = 2'-fluoroguanosine
  modified_base 11: mod_base = OTHER; note = 2'-O-methyladenosine
  modified_base 12: mod_base = OTHER; note = 2'-fluoroguanosine
  modified_base 13: mod_base = gm
  modified_base 14: mod_base = OTHER; note = 2'-fluoroadenosine
  modified_base 15: mod_base = cm
  modified_base 16: mod_base = OTHER; note = 2'-fluorocytidine
  modified_base 17: mod_base = OTHER; note = 2'-O-methyladenosine
  modified_base 18: mod_base = OTHER; note = 2'-fluoroguanosine
  modified_base 19: mod_base = cm
  modified_base 20: mod_base = OTHER; note = 2'-fluoroadenosine
  modified_base 20^21: mod_base = OTHER; note = phosphorothioate linkage
  modified_base 21: mod_base = cm
  source 1..21: mol_type = other RNA
tcacagactgaggaccagcac

SEQ ID NO: 561 - RNA, 21 nt, synthetic construct
  modified_base 1: mod_base = um
  modified_base 1^2: mod_base = OTHER; note = phosphorothioate linkage
  modified_base 2: mod_base = OTHER; note = 2'-fluorouridine
  modified_base 2^3: mod_base = OTHER; note = phosphorothioate linkage
  modified_base 3: mod_base = gm
  modified_base 3^4: mod_base = OTHER; note = phosphorothioate linkage
  modified_base 4: mod_base = OTHER; note = 2'-fluorouridine
  modified_base 5: mod_base = gm
  modified_base 6: mod_base = OTHER; note = 2'-fluorouridine
  modified_base 7: mod_base = um
  modified_base 8: mod_base = OTHER; note = 2'-fluorocytidine
  modified_base 9: mod_base = OTHER; note = 2'-O-methyladenosine
  modified_base 10: mod_base = OTHER; note = 2'-fluoroguanosine
  modified_base 11: mod_base = um
  modified_base 12: mod_base = OTHER; note = 2'-fluorouridine
  modified_base 13: mod_base = um
  modified_base 14: mod_base = OTHER; note = 2'-fluorocytidine
  modified_base 15: mod_base = cm
  modified_base 16: mod_base = OTHER; note = 2'-fluoroadenosine
  modified_base 17: mod_base = um
  modified_base 18: mod_base = OTHER; note = 2'-fluorouridine
  modified_base 19: mod_base = cm
  modified_base 20: mod_base = OTHER; note = 2'-fluorocytidine
  modified_base 20^21: mod_base = OTHER; note = phosphorothioate linkage
  modified_base 21: mod_base = cm
  source 1..21: mol_type = other RNA
ttgtgttcagtttccattccc

SEQ ID NO: 562 - RNA, 21 nt, synthetic construct
  modified_base 1: mod_base = um
  modified_base 1^2: mod_base = OTHER; note = phosphorothioate linkage
  modified_base 2: mod_base = OTHER; note = 2'-fluorouridine
  modified_base 2^3: mod_base = OTHER; note = phosphorothioate linkage
  modified_base 3: mod_base = gm
  modified_base 3^4: mod_base = OTHER; note = phosphorothioate linkage
  modified_base 4: mod_base = OTHER; note = 2'-fluorouridine
  modified_base 5: mod_base = gm
  modified_base 6: mod_base = OTHER; note = 2'-fluorouridine
  modified_base 7: mod_base = OTHER; note = 2 ,3 -seco-uridine
  modified_base 8: mod_base = OTHER; note = 2'-fluorocytidine
  modified_base 9: mod_base = OTHER; note = 2'-O-methyladenosine
  modified_base 10: mod_base = OTHER; note = 2'-fluoroguanosine
  modified_base 11: mod_base = um
  modified_base 12: mod_base = OTHER; note = 2'-fluorouridine
  modified_base 13: mod_base = um
  modified_base 14: mod_base = OTHER; note = 2'-fluorocytidine
  modified_base 15: mod_base = cm
  modified_base 16: mod_base = OTHER; note = 2'-fluoroadenosine
  modified_base 17: mod_base = um
  modified_base 18: mod_base = OTHER; note = 2'-fluorouridine
  modified_base 19: mod_base = cm
  modified_base 20: mod_base = OTHER; note = 2'-fluorocytidine
  modified_base 20^21: mod_base = OTHER; note = phosphorothioate linkage
  modified_base 21: mod_base = gm
  source 1..21: mol_type = other RNA
ttgtgttcagtttccattccg

SEQ ID NO: 563 - RNA, 21 nt, synthetic construct
  modified_base 1: mod_base = um
  modified_base 1^2: mod_base = OTHER; note = phosphorothioate linkage
  modified_base 2: mod_base = OTHER; note = 2'-fluorouridine
  modified_base 2^3: mod_base = OTHER; note = phosphorothioate linkage
  modified_base 3: mod_base = gm
  modified_base 3^4: mod_base = OTHER; note = phosphorothioate linkage
  modified_base 4: mod_base = OTHER; note = 2'-fluorouridine
  modified_base 5: mod_base = gm
  modified_base 6: mod_base = OTHER; note = 2'-fluorouridine
  modified_base 7: mod_base = um
  modified_base 8: mod_base = cm
  modified_base 9: mod_base = OTHER; note = 2'-O-methyladenosine
  modified_base 10: mod_base = gm
  modified_base 11: mod_base = um
  modified_base 12: mod_base = OTHER; note = 2'-fluorouridine
  modified_base 13: mod_base = um
  modified_base 14: mod_base = OTHER; note = 2'-fluorocytidine
  modified_base 15: mod_base = cm
  modified_base 16: mod_base = OTHER; note = 2'-fluoroadenosine
  modified_base 17: mod_base = um
  modified_base 18: mod_base = OTHER; note = 2'-fluorouridine
  modified_base 19: mod_base = cm
  modified_base 20: mod_base = OTHER; note = 2'-fluorocytidine
  modified_base 20^21: mod_base = OTHER; note = phosphorothioate linkage
  modified_base 21: mod_base = gm
  source 1..21: mol_type = other RNA
ttgtgttcagtttccattccg

SEQ ID NO: 564 - RNA, 21 nt, synthetic construct
  modified_base 1: mod_base = um
  modified_base 1^2: mod_base = OTHER; note = phosphorothioate linkage
  modified_base 2: mod_base = OTHER; note = 2'-fluorouridine
  modified_base 2^3: mod_base = OTHER; note = phosphorothioate linkage
  modified_base 3: mod_base = gm
  modified_base 3^4: mod_base = OTHER; note = phosphorothioate linkage
  modified_base 4: mod_base = um
  modified_base 5: mod_base = gm
  modified_base 6: mod_base = um
  modified_base 7: mod_base = um
  modified_base 8: mod_base = cm
  modified_base 9: mod_base = OTHER; note = 2'-O-methyladenosine
  modified_base 10: mod_base = gm
  modified_base 11: mod_base = um
  modified_base 12: mod_base = OTHER; note = 2'-fluorouridine
  modified_base 13: mod_base = um
  modified_base 14: mod_base = OTHER; note = 2'-fluorocytidine
  modified_base 15: mod_base = cm
  modified_base 16: mod_base = OTHER; note = 2'-fluoroadenosine
  modified_base 17: mod_base = um
  modified_base 18: mod_base = um
  modified_base 19: mod_base = cm
  modified_base 20: mod_base = cm
  modified_base 20^21: mod_base = OTHER; note = phosphorothioate linkage
  modified_base 21: mod_base = gm
  source 1..21: mol_type = other RNA
ttgtgttcagtttccattccg

SEQ ID NO: 565 - RNA, 21 nt, synthetic construct
  modified_base 1: mod_base = um
  modified_base 1^2: mod_base = OTHER; note = phosphorothioate linkage
  modified_base 2: mod_base = OTHER; note = 2'-fluorouridine
  modified_base 2^3: mod_base = OTHER; note = phosphorothioate linkage
  modified_base 3: mod_base = gm
  modified_base 3^4: mod_base = OTHER; note = phosphorothioate linkage
  modified_base 4: mod_base = um
  modified_base 5: mod_base = gm
  modified_base 6: mod_base = um
  modified_base 7: mod_base = um
  modified_base 8: mod_base = cm
  modified_base 9: mod_base = OTHER; note = 2'-O-methyladenosine
  modified_base 10: mod_base = OTHER; note = 2'-fluoroguanosine
  modified_base 11: mod_base = um
  modified_base 12: mod_base = OTHER; note = 2'-fluorouridine
  modified_base 13: mod_base = um
  modified_base 14: mod_base = OTHER; note = 2'-fluorocytidine
  modified_base 15: mod_base = cm
  modified_base 16: mod_base = OTHER; note = 2'-fluoroadenosine
  modified_base 17: mod_base = um
  modified_base 18: mod_base = um
  modified_base 19: mod_base = cm
  modified_base 20: mod_base = cm
  modified_base 20^21: mod_base = OTHER; note = phosphorothioate linkage
  modified_base 21: mod_base = gm
  source 1..21: mol_type = other RNA
ttgtgttcagtttccattccg

SEQ ID NO: 566 - RNA, 21 nt, synthetic construct
  modified_base 1: mod_base = um
  modified_base 1^2: mod_base = OTHER; note = phosphorothioate linkage
  modified_base 2: mod_base = OTHER; note = 2'-fluoroguanosine
  modified_base 2^3: mod_base = OTHER; note = phosphorothioate linkage
  modified_base 3: mod_base = OTHER; note = 2'-O-methyladenosine
  modified_base 3^4: mod_base = OTHER; note = phosphorothioate linkage
  modified_base 4: mod_base = OTHER; note = 2'-fluorouridine
  modified_base 5: mod_base = gm
  modified_base 6: mod_base = OTHER; note = 2'-fluorouridine
  modified_base 7: mod_base = um
  modified_base 8: mod_base = OTHER; note = 2'-fluorouridine
  modified_base 9: mod_base = um
  modified_base 10: mod_base = OTHER; note = 2'-fluoroguanosine
  modified_base 11: mod_base = OTHER; note = 2'-O-methyladenosine
  modified_base 12: mod_base = OTHER; note = 2'-fluoroguanosine
  modified_base 13: mod_base = cm
  modified_base 14: mod_base = OTHER; note = 2'-fluoroadenosine
  modified_base 15: mod_base = cm
  modified_base 16: mod_base = OTHER; note = 2'-fluorocytidine
  modified_base 17: mod_base = um
  modified_base 18: mod_base = OTHER; note = 2'-fluoroadenosine
  modified_base 19: mod_base = cm
  modified_base 20: mod_base = OTHER; note = 2'-fluorouridine
  modified_base 20^21: mod_base = OTHER; note = phosphorothioate linkage
  modified_base 21: mod_base = cm
  source 1..21: mol_type = other RNA
tgatgttttgagcacctactc

SEQ ID NO: 567 - RNA, 21 nt, synthetic construct
  modified_base 1: mod_base = um
  modified_base 1^2: mod_base = OTHER; note = phosphorothioate linkage
  modified_base 2: mod_base = OTHER; note = 2'-fluorouridine
  modified_base 2^3: mod_base = OTHER; note = phosphorothioate linkage
  modified_base 3: mod_base = cm
  modified_base 3^4: mod_base = OTHER; note = phosphorothioate linkage
  modified_base 4: mod_base = OTHER; note = 2'-fluorocytidine
  modified_base 5: mod_base = OTHER; note = 2'-O-methyladenosine
  modified_base 6: mod_base = OTHER; note = 2'-fluorouridine
  modified_base 7: mod_base = um
  modified_base 8: mod_base = OTHER; note = 2'-fluorocytidine
  modified_base 9: mod_base = cm
  modified_base 10: mod_base = OTHER; note = 2'-fluorouridine
  modified_base 11: mod_base = gm
  modified_base 12: mod_base = OTHER; note = 2'-fluorouridine
  modified_base 13: mod_base = um
  modified_base 14: mod_base = OTHER; note = 2'-fluorocytidine
  modified_base 15: mod_base = OTHER; note = 2'-O-methyladenosine
  modified_base 16: mod_base = OTHER; note = 2'-fluorouridine
  modified_base 17: mod_base = um
  modified_base 18: mod_base = OTHER; note = 2'-fluoroguanosine
  modified_base 19: mod_base = cm
  modified_base 20: mod_base = OTHER; note = 2'-fluorocytidine
  modified_base 20^21: mod_base = OTHER; note = phosphorothioate linkage
  modified_base 21: mod_base = um
  source 1..21: mol_type = other RNA
ttccattcctgttcattgcct

SEQ ID NO: 568 - RNA, 21 nt, synthetic construct
  modified_base 1: mod_base = um
  modified_base 1^2: mod_base = OTHER; note = phosphorothioate linkage
  modified_base 2: mod_base = OTHER; note = 2'-fluoroguanosine
  modified_base 2^3: mod_base = OTHER; note = phosphorothioate linkage
  modified_base 3: mod_base = OTHER; note = 2'-O-methyladenosine
  modified_base 3^4: mod_base = OTHER; note = phosphorothioate linkage
  modified_base 4: mod_base = OTHER; note = 2'-fluoroadenosine
  modified_base 5: mod_base = um
  modified_base 6: mod_base = OTHER; note = 2'-fluorocytidine
  modified_base 7: mod_base = um
  modified_base 8: mod_base = OTHER; note = 2'-fluoroguanosine
  modified_base 9: mod_base = gm
  modified_base 10: mod_base = OTHER; note = 2'-fluorouridine
  modified_base 11: mod_base = OTHER; note = 2'-O-methyladenosine
  modified_base 12: mod_base = OTHER; note = 2'-fluoroguanosine
  modified_base 13: mod_base = OTHER; note = 2'-O-methyladenosine
  modified_base 14: mod_base = OTHER; note = 2'-fluorocytidine
  modified_base 15: mod_base = OTHER; note = 2'-O-methyladenosine
  modified_base 16: mod_base = OTHER; note = 2'-fluorocytidine
  modified_base 17: mod_base = gm
  modified_base 18: mod_base = OTHER; note = 2'-fluoroguanosine
  modified_base 19: mod_base = OTHER; note = 2'-O-methyladenosine
  modified_base 20: mod_base = OTHER; note = 2'-fluorocytidine
  modified_base 20^21: mod_base = OTHER; note = phosphorothioate linkage
  modified_base 21: mod_base = um
  source 1..21: mol_type = other RNA
tgaatctggtagacacggact

SEQ ID NO: 569 - RNA, 21 nt, synthetic construct
  modified_base 1: mod_base = um
  modified_base 1^2: mod_base = OTHER; note = phosphorothioate linkage
  modified_base 2: mod_base = OTHER; note = 2'-fluoroadenosine
  modified_base 2^3: mod_base = OTHER; note = phosphorothioate linkage
  modified_base 3: mod_base = gm
  modified_base 3^4: mod_base = OTHER; note = phosphorothioate linkage
  modified_base 4: mod_base = OTHER; note = 2'-fluoroguanosine
  modified_base 5: mod_base = OTHER; note = 2'-O-methyladenosine
  modified_base 6: mod_base = OTHER; note = 2'-fluoroadenosine
  modified_base 7: mod_base = um
  modified_base 8: mod_base = OTHER; note = 2'-fluorocytidine
  modified_base 9: mod_base = um
  modified_base 10: mod_base = OTHER; note = 2'-fluoroguanosine
  modified_base 11: mod_base = gm
  modified_base 12: mod_base = OTHER; note = 2'-fluorouridine
  modified_base 13: mod_base = OTHER; note = 2'-O-methyladenosine
  modified_base 14: mod_base = OTHER; note = 2'-fluoroguanosine
  modified_base 15: mod_base = OTHER; note = 2'-O-methyladenosine
  modified_base 16: mod_base = OTHER; note = 2'-fluorocytidine
  modified_base 17: mod_base = OTHER; note = 2'-O-methyladenosine
  modified_base 18: mod_base = OTHER; note = 2'-fluorocytidine
  modified_base 19: mod_base = gm
  modified_base 20: mod_base = OTHER; note = 2'-fluoroguanosine
  modified_base 20^21: mod_base = OTHER; note = phosphorothioate linkage
  modified_base 21: mod_base = OTHER; note = 2'-O-methyladenosine
  source 1..21: mol_type = other RNA
taggaatctggtagacacgga

SEQ ID NO: 570 - RNA, 21 nt, synthetic construct
  modified_base 1: mod_base = um
  modified_base 1^2: mod_base = OTHER; note = phosphorothioate linkage
  modified_base 2: mod_base = OTHER; note = 2'-fluoroadenosine
  modified_base 2^3: mod_base = OTHER; note = phosphorothioate linkage
  modified_base 3: mod_base = OTHER; note = 2'-O-methyladenosine
  modified_base 3^4: mod_base = OTHER; note = phosphorothioate linkage
  modified_base 4: mod_base = OTHER; note = 2'-fluoroguanosine
  modified_base 5: mod_base = cm
  modified_base 6: mod_base = OTHER; note = 2'-fluorouridine
  modified_base 7: mod_base = OTHER; note = 2'-O-methyladenosine
  modified_base 8: mod_base = OTHER; note = 2'-fluorocytidine
  modified_base 9: mod_base = OTHER; note = 2'-O-methyladenosine
  modified_base 10: mod_base = OTHER; note = 2'-fluoroguanosine
  modified_base 11: mod_base = gm
  modified_base 12: mod_base = OTHER; note = 2'-fluoroadenosine
  modified_base 13: mod_base = gm
  modified_base 14: mod_base = OTHER; note = 2'-fluoroadenosine
  modified_base 15: mod_base = OTHER; note = 2'-O-methyladenosine
  modified_base 16: mod_base = OTHER; note = 2'-fluoroguanosine
  modified_base 17: mod_base = gm
  modified_base 18: mod_base = OTHER; note = 2'-fluorouridine
  modified_base 19: mod_base = gm
  modified_base 20: mod_base = OTHER; note = 2'-fluoroguanosine
  modified_base 20^21: mod_base = OTHER; note = phosphorothioate linkage
  modified_base 21: mod_base = gm
  source 1..21: mol_type = other RNA
taagctacaggagaaggtggg

SEQ ID NO: 571 - RNA, 21 nt, synthetic construct
  modified_base 1: mod_base = um
  modified_base 1^2: mod_base = OTHER; note = phosphorothioate linkage
  modified_base 2: mod_base = OTHER; note = 2'-fluorocytidine
  modified_base 2^3: mod_base = OTHER; note = phosphorothioate linkage
  modified_base 3: mod_base = OTHER; note = 2'-O-methyladenosine
  modified_base 3^4: mod_base = OTHER; note = phosphorothioate linkage
  modified_base 4: mod_base = OTHER; note = 2'-fluorouridine
  modified_base 5: mod_base = cm
  modified_base 6: mod_base = OTHER; note = 2'-fluorocytidine
  modified_base 7: mod_base = OTHER; note = 2'-O-methyladenosine
  modified_base 8: mod_base = OTHER; note = 2'-fluoroguanosine
  modified_base 9: mod_base = um
  modified_base 10: mod_base = OTHER; note = 2'-fluoroguanosine
  modified_base 11: mod_base = gm
  modified_base 12: mod_base = OTHER; note = 2'-fluoroadenosine
  modified_base 13: mod_base = um
  modified_base 14: mod_base = OTHER; note = 2'-fluorouridine
  modified_base 15: mod_base = um
  modified_base 16: mod_base = OTHER; note = 2'-fluoroguanosine
  modified_base 17: mod_base = OTHER; note = 2'-O-methyladenosine
  modified_base 18: mod_base = OTHER; note = 2'-fluoroguanosine
  modified_base 19: mod_base = gm
  modified_base 20: mod_base = OTHER; note = 2'-fluoroadenosine
  modified_base 20^21: mod_base = OTHER; note = phosphorothioate linkage
  modified_base 21: mod_base = gm
  source 1..21: mol_type = other RNA
tcatccagtggatttgaggag

SEQ ID NO: 572 - RNA, 21 nt, synthetic construct
  modified_base 1: mod_base = OTHER; note = 2'-O-methyladenosine
  modified_base 1^2: mod_base = OTHER; note = phosphorothioate linkage
  modified_base 2: mod_base = OTHER; note = 2'-fluoroguanosine
  modified_base 2^3: mod_base = OTHER; note = phosphorothioate linkage
  modified_base 3: mod_base = um
  modified_base 3^4: mod_base = OTHER; note = phosphorothioate linkage
  modified_base 4: mod_base = OTHER; note = 2'-fluorouridine
  modified_base 5: mod_base = cm
  modified_base 6: mod_base = OTHER; note = 2'-fluoroadenosine
  modified_base 7: mod_base = gm
  modified_base 8: mod_base = OTHER; note = 2'-fluoroadenosine
  modified_base 9: mod_base = gm
  modified_base 10: mod_base = OTHER; note = 2'-fluoroguanosine
  modified_base 11: mod_base = cm
  modified_base 12: mod_base = OTHER; note = 2'-fluoroadenosine
  modified_base 13: mod_base = gm
  modified_base 14: mod_base = OTHER; note = 2'-fluoroadenosine
  modified_base 15: mod_base = OTHER; note = 2'-O-methyladenosine
  modified_base 16: mod_base = OTHER; note = 2'-fluorouridine
  modified_base 17: mod_base = cm
  modified_base 18: mod_base = OTHER; note = 2'-fluorouridine
  modified_base 19: mod_base = OTHER; note = 2'-O-methyladenosine
  modified_base 20: mod_base = OTHER; note = 2'-fluorocytidine
  modified_base 20^21: mod_base = OTHER; note = phosphorothioate linkage
  modified_base 21: mod_base = cm
  source 1..21: mol_type = other RNA
agttcagaggcagaatctacc

SEQ ID NO: 573 - RNA, 21 nt, synthetic construct
  modified_base 1: mod_base = um
  modified_base 1^2: mod_base = OTHER; note = phosphorothioate linkage
  modified_base 2: mod_base = OTHER; note = 2'-fluoroguanosine
  modified_base 2^3: mod_base = OTHER; note = phosphorothioate linkage
  modified_base 3: mod_base = OTHER; note = 2'-O-methyladenosine
  modified_base 3^4: mod_base = OTHER; note = phosphorothioate linkage
  modified_base 4: mod_base = OTHER; note = 2'-fluoroguanosine
  modified_base 5: mod_base = um
  modified_base 6: mod_base = OTHER; note = 2'-fluorouridine
  modified_base 7: mod_base = OTHER; note = 2 ,3 -seco-cytidine
  modified_base 8: mod_base = OTHER; note = 2'-fluoroadenosine
  modified_base 9: mod_base = gm
  modified_base 10: mod_base = OTHER; note = 2'-fluoroadenosine
  modified_base 11: mod_base = gm
  modified_base 12: mod_base = OTHER; note = 2'-fluoroguanosine
  modified_base 13: mod_base = cm
  modified_base 14: mod_base = OTHER; note = 2'-fluoroadenosine
  modified_base 15: mod_base = gm
  modified_base 16: mod_base = OTHER; note = 2'-fluoroadenosine
  modified_base 17: mod_base = OTHER; note = 2'-O-methyladenosine
  modified_base 18: mod_base = OTHER; note = 2'-fluorouridine
  modified_base 19: mod_base = cm
  modified_base 20: mod_base = OTHER; note = 2'-fluorouridine
  modified_base 20^21: mod_base = OTHER; note = phosphorothioate linkage
  modified_base 21: mod_base = OTHER; note = 2'-O-methyladenosine
  source 1..21: mol_type = other RNA
tgagttcagaggcagaatcta

SEQ ID NO: 574 - RNA, 21 nt, synthetic construct
  modified_base 1: mod_base = OTHER; note = 2'-O-methyladenosine
  modified_base 1^2: mod_base = OTHER; note = phosphorothioate linkage
  modified_base 2: mod_base = OTHER; note = 2'-fluorocytidine
  modified_base 2^3: mod_base = OTHER; note = phosphorothioate linkage
  modified_base 3: mod_base = cm
  modified_base 3^4: mod_base = OTHER; note = phosphorothioate linkage
  modified_base 4: mod_base = OTHER; note = 2'-fluorouridine
  modified_base 5: mod_base = um
  modified_base 6: mod_base = OTHER; note = 2'-fluoroadenosine
  modified_base 7: mod_base = um
  modified_base 8: mod_base = OTHER; note = 2'-fluorouridine
  modified_base 9: mod_base = gm
  modified_base 10: mod_base = OTHER; note = 2'-fluoroguanosine
  modified_base 11: mod_base = gm
  modified_base 12: mod_base = OTHER; note = 2'-fluoroadenosine
  modified_base 13: mod_base = OTHER; note = 2'-O-methyladenosine
  modified_base 14: mod_base = OTHER; note = 2'-fluorocytidine
  modified_base 15: mod_base = OTHER; note = 2'-O-methyladenosine
  modified_base 16: mod_base = OTHER; note = 2'-fluorocytidine
  modified_base 17: mod_base = cm
  modified_base 18: mod_base = OTHER; note = 2'-fluoroadenosine
  modified_base 19: mod_base = gm
  modified_base 20: mod_base = OTHER; note = 2'-fluorocytidine
  modified_base 20^21: mod_base = OTHER; note = phosphorothioate linkage
  modified_base 21: mod_base = cm
  source 1..21: mol_type = other RNA
accttattgggaacaccagcc

SEQ ID NO: 575 - RNA, 21 nt, synthetic construct
  modified_base 1: mod_base = um
  modified_base 1^2: mod_base = OTHER; note = phosphorothioate linkage
  modified_base 2: mod_base = OTHER; note = 2'-fluorocytidine
  modified_base 2^3: mod_base = OTHER; note = phosphorothioate linkage
  modified_base 3: mod_base = OTHER; note = 2'-O-methyladenosine
  modified_base 3^4: mod_base = OTHER; note = phosphorothioate linkage
  modified_base 4: mod_base = OTHER; note = 2'-fluorocytidine
  modified_base 5: mod_base = cm
  modified_base 6: mod_base = OTHER; note = 2'-fluorouridine
  modified_base 7: mod_base = um
  modified_base 8: mod_base = OTHER; note = 2'-fluoroadenosine
  modified_base 9: mod_base = um
  modified_base 10: mod_base = OTHER; note = 2'-fluorouridine
  modified_base 11: mod_base = gm
  modified_base 12: mod_base = OTHER; note = 2'-fluoroguanosine
  modified_base 13: mod_base = gm
  modified_base 14: mod_base = OTHER; note = 2'-fluoroadenosine
  modified_base 15: mod_base = OTHER; note = 2'-O-methyladenosine
  modified_base 16: mod_base = OTHER; note = 2'-fluorocytidine
  modified_base 17: mod_base = OTHER; note = 2'-O-methyladenosine
  modified_base 18: mod_base = OTHER; note = 2'-fluorocytidine
  modified_base 19: mod_base = cm
  modified_base 20: mod_base = OTHER; note = 2'-fluoroadenosine
  modified_base 20^21: mod_base = OTHER; note = phosphorothioate linkage
  modified_base 21: mod_base = gm
  source 1..21: mol_type = other RNA
tcaccttattgggaacaccag

SEQ ID NO: 576 - RNA, 21 nt, synthetic construct
  modified_base 1: mod_base = um
  modified_base 1^2: mod_base = OTHER; note = phosphorothioate linkage
  modified_base 2: mod_base = OTHER; note = 2'-fluorocytidine
  modified_base 2^3: mod_base = OTHER; note = phosphorothioate linkage
  modified_base 3: mod_base = OTHER; note = 2'-O-methyladenosine
  modified_base 3^4: mod_base = OTHER; note = phosphorothioate linkage
  modified_base 4: mod_base = OTHER; note = 2'-fluorouridine
  modified_base 5: mod_base = cm
  modified_base 6: mod_base = OTHER; note = 2'-fluorocytidine
  modified_base 7: mod_base = OTHER; note = 2'-O-methyladenosine
  modified_base 8: mod_base = OTHER; note = 2'-fluoroadenosine
  modified_base 9: mod_base = gm
  modified_base 10: mod_base = OTHER; note = 2'-fluorouridine
  modified_base 11: mod_base = gm
  modified_base 12: mod_base = OTHER; note = 2'-fluorocytidine
  modified_base 13: mod_base = cm
  modified_base 14: mod_base = OTHER; note = 2'-fluoroadenosine
  modified_base 15: mod_base = gm
  modified_base 16: mod_base = OTHER; note = 2'-fluorocytidine
  modified_base 17: mod_base = um
  modified_base 18: mod_base = OTHER; note = 2'-fluoroadenosine
  modified_base 19: mod_base = OTHER; note = 2'-O-methyladenosine
  modified_base 20: mod_base = OTHER; note = 2'-fluoroguanosine
  modified_base 20^21: mod_base = OTHER; note = phosphorothioate linkage
  modified_base 21: mod_base = cm
  source 1..21: mol_type = other RNA
tcatccaagtgccagctaagc

SEQ ID NO: 577 - RNA, 21 nt, synthetic construct
  modified_base 1: mod_base = OTHER; note = 2'-O-methyladenosine
  modified_base 1^2: mod_base = OTHER; note = phosphorothioate linkage
  modified_base 2: mod_base = OTHER; note = 2'-fluoroguanosine
  modified_base 2^3: mod_base = OTHER; note = phosphorothioate linkage
  modified_base 3: mod_base = OTHER; note = 2'-O-methyladenosine
  modified_base 3^4: mod_base = OTHER; note = phosphorothioate linkage
  modified_base 4: mod_base = OTHER; note = 2'-fluorouridine
  modified_base 5: mod_base = OTHER; note = 2'-O-methyladenosine
  modified_base 6: mod_base = OTHER; note = 2'-fluorocytidine
  modified_base 7: mod_base = um
  modified_base 8: mod_base = OTHER; note = 2'-fluorocytidine
  modified_base 9: mod_base = cm
  modified_base 10: mod_base = OTHER; note = 2'-fluorocytidine
  modified_base 11: mod_base = um
  modified_base 12: mod_base = OTHER; note = 2'-fluorouridine
  modified_base 13: mod_base = cm
  modified_base 14: mod_base = OTHER; note = 2'-fluorouridine
  modified_base 15: mod_base = cm
  modified_base 16: mod_base = OTHER; note = 2'-fluoroadenosine
  modified_base 17: mod_base = um
  modified_base 18: mod_base = OTHER; note = 2'-fluorouridine
  modified_base 19: mod_base = OTHER; note = 2'-O-methyladenosine
  modified_base 20: mod_base = OTHER; note = 2'-fluoroguanosine
  modified_base 20^21: mod_base = OTHER; note = phosphorothioate linkage
  modified_base 21: mod_base = gm
  source 1..21: mol_type = other RNA
agatactcccttctcattagg

SEQ ID NO: 578 - RNA, 21 nt, synthetic construct
  modified_base 1: mod_base = um
  modified_base 1^2: mod_base = OTHER; note = phosphorothioate linkage
  modified_base 2: mod_base = OTHER; note = 2'-fluorocytidine
  modified_base 2^3: mod_base = OTHER; note = phosphorothioate linkage
  modified_base 3: mod_base = OTHER; note = 2'-O-methyladenosine
  modified_base 3^4: mod_base = OTHER; note = phosphorothioate linkage
  modified_base 4: mod_base = OTHER; note = 2'-fluorocytidine
  modified_base 5: mod_base = OTHER; note = 2'-O-methyladenosine
  modified_base 6: mod_base = OTHER; note = 2'-fluoroguanosine
  modified_base 7: mod_base = OTHER; note = 2'-O-methyladenosine
  modified_base 8: mod_base = OTHER; note = 2'-fluorouridine
  modified_base 9: mod_base = OTHER; note = 2'-O-methyladenosine
  modified_base 10: mod_base = OTHER; note = 2'-fluorocytidine
  modified_base 11: mod_base = um
  modified_base 12: mod_base = OTHER; note = 2'-fluorocytidine
  modified_base 13: mod_base = cm
  modified_base 14: mod_base = OTHER; note = 2'-fluorocytidine
  modified_base 15: mod_base = um
  modified_base 16: mod_base = OTHER; note = 2'-fluorouridine
  modified_base 17: mod_base = cm
  modified_base 18: mod_base = OTHER; note = 2'-fluorouridine
  modified_base 19: mod_base = cm
  modified_base 20: mod_base = OTHER; note = 2'-fluoroadenosine
  modified_base 20^21: mod_base = OTHER; note = phosphorothioate linkage
  modified_base 21: mod_base = cm
  source 1..21: mol_type = other RNA
tcacagatactcccttctcac

SEQ ID NO: 579 - RNA, 21 nt, synthetic construct
  modified_base 1: mod_base = um
  modified_base 1^2: mod_base = OTHER; note = phosphorothioate linkage
  modified_base 2: mod_base = OTHER; note = 2'-fluoroguanosine
  modified_base 2^3: mod_base = OTHER; note = phosphorothioate linkage
  modified_base 3: mod_base = um
  modified_base 3^4: mod_base = OTHER; note = phosphorothioate linkage
  modified_base 4: mod_base = OTHER; note = 2'-fluorouridine
  modified_base 5: mod_base = cm
  modified_base 6: mod_base = OTHER; note = 2'-fluoroguanosine
  modified_base 7: mod_base = OTHER; note = 2'-O-methyladenosine
  modified_base 8: mod_base = OTHER; note = 2'-fluorouridine
  modified_base 9: mod_base = gm
  modified_base 10: mod_base = OTHER; note = 2'-fluoroadenosine
  modified_base 11: mod_base = um
  modified_base 12: mod_base = OTHER; note = 2'-fluoroguanosine
  modified_base 13: mod_base = cm
  modified_base 14: mod_base = OTHER; note = 2'-fluorouridine
  modified_base 15: mod_base = gm
  modified_base 16: mod_base = OTHER; note = 2'-fluoroadenosine
  modified_base 17: mod_base = um
  modified_base 18: mod_base = OTHER; note = 2'-fluoroguanosine
  modified_base 19: mod_base = cm
  modified_base 20: mod_base = OTHER; note = 2'-fluorouridine
  modified_base 20^21: mod_base = OTHER; note = phosphorothioate linkage
  modified_base 21: mod_base = gm
  source 1..21: mol_type = other RNA
tgttcgatgatgctgatgctg

SEQ ID NO: 580 - RNA, 21 nt, synthetic construct
  modified_base 1: mod_base = OTHER; note = 5 -cyclopropyl phosphonate-2 -O-methyluridine
  modified_base 1^2: mod_base = OTHER; note = phosphorothioate linkage
  modified_base 2: mod_base = OTHER; note = 2'-fluorouridine
  modified_base 3: mod_base = gm
  modified_base 4: mod_base = OTHER; note = 2'-fluorouridine
  modified_base 5: mod_base = gm
  modified_base 6: mod_base = OTHER; note = 2'-fluorouridine
  modified_base 7: mod_base = um
  modified_base 8: mod_base = OTHER; note = 2'-fluorocytidine
  modified_base 9: mod_base = OTHER; note = 2'-O-methyladenosine
  modified_base 10: mod_base = OTHER; note = 2'-fluoroguanosine
  modified_base 11: mod_base = um
  modified_base 12: mod_base = OTHER; note = 2'-fluorouridine
  modified_base 13: mod_base = um
  modified_base 14: mod_base = OTHER; note = 2'-fluorocytidine
  modified_base 15: mod_base = cm
  modified_base 16: mod_base = OTHER; note = 2'-fluoroadenosine
  modified_base 17: mod_base = um
  modified_base 18: mod_base = OTHER; note = 2'-fluorouridine
  modified_base 19: mod_base = cm
  modified_base 20: mod_base = OTHER; note = 2'-fluorocytidine
  modified_base 20^21: mod_base = OTHER; note = phosphorothioate linkage
  modified_base 21: mod_base = gm
  source 1..21: mol_type = other RNA
ttgtgttcagtttccattccg

SEQ ID NO: 581 - RNA, 21 nt, synthetic construct
  modified_base 1: mod_base = OTHER; note = 5 -cyclopropyl phosphonate-2 -O-methyluridine
  modified_base 2: mod_base = OTHER; note = 2'-fluorouridine
  modified_base 3: mod_base = gm
  modified_base 4: mod_base = OTHER; note = 2'-fluorouridine
  modified_base 5: mod_base = gm
  modified_base 6: mod_base = OTHER; note = 2'-fluorouridine
  modified_base 7: mod_base = um
  modified_base 8: mod_base = OTHER; note = 2'-fluorocytidine
  modified_base 9: mod_base = OTHER; note = 2'-O-methyladenosine
  modified_base 10: mod_base = OTHER; note = 2'-fluoroguanosine
  modified_base 11: mod_base = um
  modified_base 12: mod_base = OTHER; note = 2'-fluorouridine
  modified_base 13: mod_base = um
  modified_base 14: mod_base = OTHER; note = 2'-fluorocytidine
  modified_base 15: mod_base = cm
  modified_base 16: mod_base = OTHER; note = 2'-fluoroadenosine
  modified_base 17: mod_base = um
  modified_base 18: mod_base = OTHER; note = 2'-fluorouridine
  modified_base 19: mod_base = cm
  modified_base 20: mod_base = OTHER; note = 2'-fluorocytidine
  modified_base 20^21: mod_base = OTHER; note = phosphorothioate linkage
  modified_base 21: mod_base = gm
  source 1..21: mol_type = other RNA
ttgtgttcagtttccattccg

SEQ ID NO: 582 - RNA, 21 nt, synthetic construct
  modified_base 1: mod_base = OTHER; note = 5 -cyclopropyl phosphonate-2 -O-methyluridine
  modified_base 1^2: mod_base = OTHER; note = phosphorothioate linkage
  modified_base 2: mod_base = OTHER; note = 2'-fluorouridine
  modified_base 2^3: mod_base = OTHER; note = phosphorothioate linkage
  modified_base 3: mod_base = gm
  modified_base 3^4: mod_base = OTHER; note = phosphorothioate linkage
  modified_base 4: mod_base = um
  modified_base 5: mod_base = gm
  modified_base 6: mod_base = um
  modified_base 7: mod_base = um
  modified_base 8: mod_base = cm
  modified_base 9: mod_base = OTHER; note = 2'-O-methyladenosine
  modified_base 10: mod_base = gm
  modified_base 11: mod_base = um
  modified_base 12: mod_base = OTHER; note = 2'-fluorouridine
  modified_base 13: mod_base = um
  modified_base 14: mod_base = OTHER; note = 2'-fluorocytidine
  modified_base 15: mod_base = cm
  modified_base 16: mod_base = OTHER; note = 2'-fluoroadenosine
  modified_base 17: mod_base = um
  modified_base 18: mod_base = um
  modified_base 19: mod_base = cm
  modified_base 20: mod_base = cm
  modified_base 20^21: mod_base = OTHER; note = phosphorothioate linkage
  modified_base 21: mod_base = gm
  source 1..21: mol_type = other RNA
ttgtgttcagtttccattccg

SEQ ID NO: 583 - RNA, 21 nt, synthetic construct
  modified_base 1: mod_base = um
  modified_base 1^2: mod_base = OTHER; note = phosphorothioate linkage
  modified_base 2: mod_base = OTHER; note = 2'-fluorouridine
  modified_base 2^3: mod_base = OTHER; note = phosphorothioate linkage
  modified_base 3: mod_base = gm
  modified_base 3^4: mod_base = OTHER; note = phosphorothioate linkage
  modified_base 4: mod_base = um
  modified_base 5: mod_base = gm
  modified_base 6: mod_base = um
  modified_base 7: mod_base = um
  modified_base 8: mod_base = OTHER; note = 2 ,3 -seco-cytidine
  modified_base 9: mod_base = OTHER; note = 2'-O-methyladenosine
  modified_base 10: mod_base = gm
  modified_base 11: mod_base = um
  modified_base 12: mod_base = OTHER; note = 2'-fluorouridine
  modified_base 13: mod_base = um
  modified_base 14: mod_base = OTHER; note = 2'-fluorocytidine
  modified_base 15: mod_base = cm
  modified_base 16: mod_base = OTHER; note = 2'-fluoroadenosine
  modified_base 17: mod_base = um
  modified_base 18: mod_base = um
  modified_base 19: mod_base = cm
  modified_base 20: mod_base = cm
  modified_base 20^21: mod_base = OTHER; note = phosphorothioate linkage
  modified_base 21: mod_base = gm
  source 1..21: mol_type = other RNA
ttgtgttcagtttccattccg

SEQ ID NO: 584 - RNA, 21 nt, synthetic construct
  modified_base 1: mod_base = um
  modified_base 1^2: mod_base = OTHER; note = phosphorothioate linkage
  modified_base 2: mod_base = OTHER; note = 2'-fluorouridine
  modified_base 2^3: mod_base = OTHER; note = phosphorothioate linkage
  modified_base 3: mod_base = gm
  modified_base 3^4: mod_base = OTHER; note = phosphorothioate linkage
  modified_base 4: mod_base = um
  modified_base 5: mod_base = gm
  modified_base 6: mod_base = um
  modified_base 7: mod_base = OTHER; note = 2 ,3 -seco-uridine
  modified_base 8: mod_base = cm
  modified_base 9: mod_base = OTHER; note = 2'-O-methyladenosine
  modified_base 10: mod_base = gm
  modified_base 11: mod_base = um
  modified_base 12: mod_base = OTHER; note = 2'-fluorouridine
  modified_base 13: mod_base = um
  modified_base 14: mod_base = OTHER; note = 2'-fluorocytidine
  modified_base 15: mod_base = cm
  modified_base 16: mod_base = OTHER; note = 2'-fluoroadenosine
  modified_base 17: mod_base = um
  modified_base 18: mod_base = um
  modified_base 19: mod_base = cm
  modified_base 20: mod_base = cm
  modified_base 20^21: mod_base = OTHER; note = phosphorothioate linkage
  modified_base 21: mod_base = gm
  source 1..21: mol_type = other RNA
ttgtgttcagtttccattccg

SEQ ID NO: 585 - RNA, 21 nt, synthetic construct
  modified_base 1: mod_base = um
  modified_base 1^2: mod_base = OTHER; note = phosphorothioate linkage
  modified_base 2: mod_base = OTHER; note = 2'-fluorouridine
  modified_base 2^3: mod_base = OTHER; note = phosphorothioate linkage
  modified_base 3: mod_base = gm
  modified_base 3^4: mod_base = OTHER; note = phosphorothioate linkage
  modified_base 4: mod_base = um
  modified_base 5: mod_base = gm
  modified_base 6: mod_base = OTHER; note = 2 ,3 -seco-uridine
  modified_base 7: mod_base = um
  modified_base 8: mod_base = cm
  modified_base 9: mod_base = OTHER; note = 2'-O-methyladenosine
  modified_base 10: mod_base = gm
  modified_base 11: mod_base = um
  modified_base 12: mod_base = OTHER; note = 2'-fluorouridine
  modified_base 13: mod_base = um
  modified_base 14: mod_base = OTHER; note = 2'-fluorocytidine
  modified_base 15: mod_base = cm
  modified_base 16: mod_base = OTHER; note = 2'-fluoroadenosine
  modified_base 17: mod_base = um
  modified_base 18: mod_base = um
  modified_base 19: mod_base = cm
  modified_base 20: mod_base = cm
  modified_base 20^21: mod_base = OTHER; note = phosphorothioate linkage
  modified_base 21: mod_base = gm
  source 1..21: mol_type = other RNA
ttgtgttcagtttccattccg

SEQ ID NO: 586 - RNA, 21 nt, synthetic construct
  modified_base 1: mod_base = um
  modified_base 1^2: mod_base = OTHER; note = phosphorothioate linkage
  modified_base 2: mod_base = OTHER; note = 2'-fluorouridine
  modified_base 2^3: mod_base = OTHER; note = phosphorothioate linkage
  modified_base 3: mod_base = gm
  modified_base 3^4: mod_base = OTHER; note = phosphorothioate linkage
  modified_base 4: mod_base = um
  modified_base 5: mod_base = gm
  modified_base 6: mod_base = um
  modified_base 7: mod_base = um
  modified_base 8: mod_base = cm
  modified_base 9: mod_base = OTHER; note = 2'-O-methyladenosine
  modified_base 10: mod_base = gm
  modified_base 11: mod_base = um
  modified_base 12: mod_base = OTHER; note = 2'-fluorouridine
  modified_base 13: mod_base = um
  modified_base 14: mod_base = OTHER; note = 2'-fluorocytidine
  modified_base 15: mod_base = cm
  modified_base 16: mod_base = OTHER; note = 2'-fluoroadenosine
  modified_base 17: mod_base = um
  modified_base 18: mod_base = um
  modified_base 19: mod_base = cm
  modified_base 20: mod_base = cm
  modified_base 20^21: mod_base = OTHER; note = phosphorothioate linkage
  modified_base 21: mod_base = cm
  source 1..21: mol_type = other RNA
ttgtgttcagtttccattccc

SEQ ID NO: 587 - RNA, 21 nt, synthetic construct
  modified_base 1: mod_base = um
  modified_base 1^2: mod_base = OTHER; note = phosphorothioate linkage
  modified_base 2: mod_base = OTHER; note = 2'-fluorouridine
  modified_base 2^3: mod_base = OTHER; note = phosphorothioate linkage
  modified_base 3: mod_base = gm
  modified_base 3^4: mod_base = OTHER; note = phosphorothioate linkage
  modified_base 4: mod_base = um
  modified_base 5: mod_base = gm
  modified_base 6: mod_base = um
  modified_base 7: mod_base = um
  modified_base 8: mod_base = cm
  modified_base 9: mod_base = OTHER; note = 2'-O-methyladenosine
  modified_base 10: mod_base = gm
  modified_base 11: mod_base = um
  modified_base 12: mod_base = OTHER; note = 2'-fluorouridine
  modified_base 13: mod_base = um
  modified_base 14: mod_base = OTHER; note = 2'-fluorocytidine
  modified_base 15: mod_base = cm
  modified_base 16: mod_base = OTHER; note = 2'-fluoroadenosine
  modified_base 17: mod_base = um
  modified_base 18: mod_base = um
  modified_base 19: mod_base = cm
  modified_base 20: mod_base = cm
  modified_base 20^21: mod_base = OTHER; note = phosphorothioate linkage
  modified_base 21: mod_base = OTHER; note = 2'-O-methyladenosine
  source 1..21: mol_type = other RNA
ttgtgttcagtttccattcca

SEQ ID NO: 588 - RNA, 21 nt, synthetic construct
  modified_base 1: mod_base = OTHER; note = 5 -cyclopropyl phosphonate-2 -O-methyluridine
  modified_base 2: mod_base = OTHER; note = 2'-fluorouridine
  modified_base 3: mod_base = gm
  modified_base 4: mod_base = um
  modified_base 5: mod_base = gm
  modified_base 6: mod_base = um
  modified_base 7: mod_base = um
  modified_base 8: mod_base = cm
  modified_base 9: mod_base = OTHER; note = 2'-O-methyladenosine
  modified_base 10: mod_base = gm
  modified_base 11: mod_base = um
  modified_base 12: mod_base = OTHER; note = 2'-fluorouridine
  modified_base 13: mod_base = um
  modified_base 14: mod_base = OTHER; note = 2'-fluorocytidine
  modified_base 15: mod_base = cm
  modified_base 16: mod_base = OTHER; note = 2'-fluoroadenosine
  modified_base 17: mod_base = um
  modified_base 18: mod_base = um
  modified_base 19: mod_base = cm
  modified_base 20: mod_base = cm
  modified_base 20^21: mod_base = OTHER; note = phosphorothioate linkage
  modified_base 21: mod_base = gm
  source 1..21: mol_type = other RNA
ttgtgttcagtttccattccg

SEQ ID NO: 589 - RNA, 21 nt, synthetic construct
  modified_base 1: mod_base = OTHER; note = 5 -cyclopropyl phosphonate-2 -O-methyluridine
  modified_base 2: mod_base = OTHER; note = 2'-fluorouridine
  modified_base 3: mod_base = gm
  modified_base 4: mod_base = um
  modified_base 5: mod_base = gm
  modified_base 6: mod_base = um
  modified_base 7: mod_base = OTHER; note = 2 ,3 -seco-uridine
  modified_base 8: mod_base = cm
  modified_base 9: mod_base = OTHER; note = 2'-O-methyladenosine
  modified_base 10: mod_base = gm
  modified_base 11: mod_base = um
  modified_base 12: mod_base = OTHER; note = 2'-fluorouridine
  modified_base 13: mod_base = um
  modified_base 14: mod_base = OTHER; note = 2'-fluorocytidine
  modified_base 15: mod_base = cm
  modified_base 16: mod_base = OTHER; note = 2'-fluoroadenosine
  modified_base 17: mod_base = um
  modified_base 18: mod_base = um
  modified_base 19: mod_base = cm
  modified_base 20: mod_base = cm
  modified_base 20^21: mod_base = OTHER; note = phosphorothioate linkage
  modified_base 21: mod_base = gm
  source 1..21: mol_type = other RNA
ttgtgttcagtttccattccg

SEQ ID NO: 590 - RNA, 21 nt, synthetic construct
  modified_base 1: mod_base = OTHER; note = 5 -cyclopropyl phosphonate-2 -O-methyluridine
  modified_base 2: mod_base = OTHER; note = 2'-fluorouridine
  modified_base 3: mod_base = gm
  modified_base 4: mod_base = um
  modified_base 5: mod_base = gm
  modified_base 6: mod_base = um
  modified_base 7: mod_base = um
  modified_base 8: mod_base = cm
  modified_base 9: mod_base = OTHER; note = 2'-O-methyladenosine
  modified_base 10: mod_base = gm
  modified_base 11: mod_base = um
  modified_base 12: mod_base = OTHER; note = 2'-fluorouridine
  modified_base 13: mod_base = um
  modified_base 14: mod_base = OTHER; note = 2'-fluorocytidine
  modified_base 15: mod_base = cm
  modified_base 16: mod_base = OTHER; note = 2'-fluoroadenosine
  modified_base 17: mod_base = um
  modified_base 18: mod_base = um
  modified_base 19: mod_base = cm
  modified_base 20: mod_base = cm
  modified_base 20^21: mod_base = OTHER; note = phosphorothioate linkage
  modified_base 21: mod_base = cm
  source 1..21: mol_type = other RNA
ttgtgttcagtttccattccc

SEQ ID NO: 591 - RNA, 21 nt, synthetic construct
  modified_base 1: mod_base = OTHER; note = 5 -cyclopropyl phosphonate-2 -O-methyluridine
  modified_base 2: mod_base = OTHER; note = 2'-fluorouridine
  modified_base 3: mod_base = gm
  modified_base 4: mod_base = um
  modified_base 5: mod_base = gm
  modified_base 6: mod_base = um
  modified_base 7: mod_base = OTHER; note = 2 ,3 -seco-uridine
  modified_base 8: mod_base = cm
  modified_base 9: mod_base = OTHER; note = 2'-O-methyladenosine
  modified_base 10: mod_base = gm
  modified_base 11: mod_base = um
  modified_base 12: mod_base = OTHER; note = 2'-fluorouridine
  modified_base 13: mod_base = um
  modified_base 14: mod_base = OTHER; note = 2'-fluorocytidine
  modified_base 15: mod_base = cm
  modified_base 16: mod_base = OTHER; note = 2'-fluoroadenosine
  modified_base 17: mod_base = um
  modified_base 18: mod_base = um
  modified_base 19: mod_base = cm
  modified_base 20: mod_base = cm
  modified_base 20^21: mod_base = OTHER; note = phosphorothioate linkage
  modified_base 21: mod_base = cm
  source 1..21: mol_type = other RNA
ttgtgttcagtttccattccc

SEQ ID NO: 592 - RNA, 21 nt, synthetic construct
  modified_base 1: mod_base = um
  modified_base 1^2: mod_base = OTHER; note = phosphorothioate linkage
  modified_base 2: mod_base = OTHER; note = 2'-fluorouridine
  modified_base 2^3: mod_base = OTHER; note = phosphorothioate linkage
  modified_base 3: mod_base = gm
  modified_base 3^4: mod_base = OTHER; note = phosphorothioate linkage
  modified_base 4: mod_base = um
  modified_base 5: mod_base = gm
  modified_base 6: mod_base = um
  modified_base 7: mod_base = OTHER; note = 2 ,3 -seco-uridine
  modified_base 8: mod_base = cm
  modified_base 9: mod_base = OTHER; note = 2'-O-methyladenosine
  modified_base 10: mod_base = gm
  modified_base 11: mod_base = um
  modified_base 12: mod_base = OTHER; note = 2'-fluorouridine
  modified_base 13: mod_base = um
  modified_base 14: mod_base = OTHER; note = 2'-fluorocytidine
  modified_base 15: mod_base = cm
  modified_base 16: mod_base = OTHER; note = 2'-fluoroadenosine
  modified_base 17: mod_base = um
  modified_base 18: mod_base = um
  modified_base 19: mod_base = cm
  modified_base 20: mod_base = cm
  modified_base 20^21: mod_base = OTHER; note = phosphorothioate linkage
  modified_base 21: mod_base = cm
  source 1..21: mol_type = other RNA
ttgtgttcagtttccattccc

SEQ ID NO: 593 - RNA, 21 nt, synthetic construct
  modified_base 1: mod_base = OTHER; note = 5 -cyclopropyl phosphonate-2 -O-methyluridine
  modified_base 1^2: mod_base = OTHER; note = phosphorothioate linkage
  modified_base 2: mod_base = OTHER; note = 2'-fluorouridine
  modified_base 2^3: mod_base = OTHER; note = phosphorothioate linkage
  modified_base 3: mod_base = gm
  modified_base 3^4: mod_base = OTHER; note = phosphorothioate linkage
  modified_base 4: mod_base = um
  modified_base 5: mod_base = gm
  modified_base 6: mod_base = um
  modified_base 7: mod_base = OTHER; note = 2 ,3 -seco-uridine
  modified_base 8: mod_base = cm
  modified_base 9: mod_base = OTHER; note = 2'-O-methyladenosine
  modified_base 10: mod_base = gm
  modified_base 11: mod_base = um
  modified_base 12: mod_base = OTHER; note = 2'-fluorouridine
  modified_base 13: mod_base = um
  modified_base 14: mod_base = OTHER; note = 2'-fluorocytidine
  modified_base 15: mod_base = cm
  modified_base 16: mod_base = OTHER; note = 2'-fluoroadenosine
  modified_base 17: mod_base = um
  modified_base 18: mod_base = um
  modified_base 19: mod_base = cm
  modified_base 20: mod_base = cm
  modified_base 20^21: mod_base = OTHER; note = phosphorothioate linkage
  modified_base 21: mod_base = gm
  source 1..21: mol_type = other RNA
ttgtgttcagtttccattccg

SEQ ID NO: 594 - RNA, 21 nt, synthetic construct
  modified_base 1: mod_base = OTHER; note = 5 -cyclopropyl phosphonate-2 -O-methyluridine
  modified_base 1^2: mod_base = OTHER; note = phosphorothioate linkage
  modified_base 2: mod_base = OTHER; note = 2'-fluorouridine
  modified_base 2^3: mod_base = OTHER; note = phosphorothioate linkage
  modified_base 3: mod_base = gm
  modified_base 3^4: mod_base = OTHER; note = phosphorothioate linkage
  modified_base 4: mod_base = um
  modified_base 5: mod_base = gm
  modified_base 6: mod_base = um
  modified_base 7: mod_base = um
  modified_base 8: mod_base = cm
  modified_base 9: mod_base = OTHER; note = 2'-O-methyladenosine
  modified_base 10: mod_base = gm
  modified_base 11: mod_base = um
  modified_base 12: mod_base = OTHER; note = 2'-fluorouridine
  modified_base 13: mod_base = um
  modified_base 14: mod_base = OTHER; note = 2'-fluorocytidine
  modified_base 15: mod_base = cm
  modified_base 16: mod_base = OTHER; note = 2'-fluoroadenosine
  modified_base 17: mod_base = um
  modified_base 18: mod_base = um
  modified_base 19: mod_base = cm
  modified_base 20: mod_base = cm
  modified_base 20^21: mod_base = OTHER; note = phosphorothioate linkage
  modified_base 21: mod_base = cm
  source 1..21: mol_type = other RNA
ttgtgttcagtttccattccc

SEQ ID NO: 595 - RNA, 21 nt, synthetic construct
  modified_base 1: mod_base = OTHER; note = 5 -cyclopropyl phosphonate-2 -O-methyluridine
  modified_base 1^2: mod_base = OTHER; note = phosphorothioate linkage
  modified_base 2: mod_base = OTHER; note = 2'-fluorouridine
  modified_base 2^3: mod_base = OTHER; note = phosphorothioate linkage
  modified_base 3: mod_base = gm
  modified_base 3^4: mod_base = OTHER; note = phosphorothioate linkage
  modified_base 4: mod_base = um
  modified_base 5: mod_base = gm
  modified_base 6: mod_base = um
  modified_base 7: mod_base = OTHER; note = 2 ,3 -seco-uridine
  modified_base 8: mod_base = cm
  modified_base 9: mod_base = OTHER; note = 2'-O-methyladenosine
  modified_base 10: mod_base = gm
  modified_base 11: mod_base = um
  modified_base 12: mod_base = OTHER; note = 2'-fluorouridine
  modified_base 13: mod_base = um
  modified_base 14: mod_base = OTHER; note = 2'-fluorocytidine
  modified_base 15: mod_base = cm
  modified_base 16: mod_base = OTHER; note = 2'-fluoroadenosine
  modified_base 17: mod_base = um
  modified_base 18: mod_base = um
  modified_base 19: mod_base = cm
  modified_base 20: mod_base = cm
  modified_base 20^21: mod_base = OTHER; note = phosphorothioate linkage
  modified_base 21: mod_base = cm
  source 1..21: mol_type = other RNA
ttgtgttcagtttccattccc

SEQ ID NO: 596 - RNA, 21 nt, synthetic construct
  modified_base 1: mod_base = um
  modified_base 1^2: mod_base = OTHER; note = phosphorothioate linkage
  modified_base 2: mod_base = OTHER; note = 2'-fluorocytidine
  modified_base 2^3: mod_base = OTHER; note = phosphorothioate linkage
  modified_base 3: mod_base = cm
  modified_base 3^4: mod_base = OTHER; note = phosphorothioate linkage
  modified_base 4: mod_base = OTHER; note = 2'-fluorouridine
  modified_base 5: mod_base = um
  modified_base 6: mod_base = OTHER; note = 2'-fluorouridine
  modified_base 7: mod_base = cm
  modified_base 8: mod_base = OTHER; note = 2'-fluorocytidine
  modified_base 9: mod_base = OTHER; note = 2'-O-methyladenosine
  modified_base 10: mod_base = OTHER; note = 2'-fluorouridine
  modified_base 11: mod_base = um
  modified_base 12: mod_base = OTHER; note = 2'-fluorocytidine
  modified_base 13: mod_base = cm
  modified_base 14: mod_base = OTHER; note = 2'-fluorouridine
  modified_base 15: mod_base = gm
  modified_base 16: mod_base = OTHER; note = 2'-fluorouridine
  modified_base 17: mod_base = um
  modified_base 18: mod_base = OTHER; note = 2'-fluorocytidine
  modified_base 19: mod_base = OTHER; note = 2'-O-methyladenosine
  modified_base 20: mod_base = OTHER; note = 2'-fluorouridine
  modified_base 20^21: mod_base = OTHER; note = phosphorothioate linkage
  modified_base 21: mod_base = cm
  source 1..21: mol_type = other RNA
tcctttccattcctgttcatc

SEQ ID NO: 597 - RNA, 21 nt, synthetic construct
  modified_base 1: mod_base = um
  modified_base 1^2: mod_base = OTHER; note = phosphorothioate linkage
  modified_base 2: mod_base = OTHER; note = 2'-fluorouridine
  modified_base 2^3: mod_base = OTHER; note = phosphorothioate linkage
  modified_base 3: mod_base = OTHER; note = 2'-O-methyladenosine
  modified_base 3^4: mod_base = OTHER; note = phosphorothioate linkage
  modified_base 4: mod_base = OTHER; note = 2'-fluoroguanosine
  modified_base 5: mod_base = OTHER; note = 2'-O-methyladenosine
  modified_base 6: mod_base = OTHER; note = 2'-fluorocytidine
  modified_base 7: mod_base = OTHER; note = 2'-O-methyladenosine
  modified_base 8: mod_base = OTHER; note = 2'-fluorocytidine
  modified_base 9: mod_base = gm
  modified_base 10: mod_base = OTHER; note = 2'-fluoroguanosine
  modified_base 11: mod_base = OTHER; note = 2'-O-methyladenosine
  modified_base 12: mod_base = OTHER; note = 2'-fluorocytidine
  modified_base 13: mod_base = um
  modified_base 14: mod_base = OTHER; note = 2'-fluorocytidine
  modified_base 15: mod_base = gm
  modified_base 16: mod_base = OTHER; note = 2'-fluoroguanosine
  modified_base 17: mod_base = um
  modified_base 18: mod_base = OTHER; note = 2'-fluoroadenosine
  modified_base 19: mod_base = gm
  modified_base 20: mod_base = OTHER; note = 2'-fluorouridine
  modified_base 20^21: mod_base = OTHER; note = phosphorothioate linkage
  modified_base 21: mod_base = cm
  source 1..21: mol_type = other RNA
ttagacacggactcggtagtc

SEQ ID NO: 598 - RNA, 21 nt, synthetic construct
  modified_base 1: mod_base = OTHER; note = 2'-O-methyladenosine
  modified_base 1^2: mod_base = OTHER; note = phosphorothioate linkage
  modified_base 2: mod_base = OTHER; note = 2'-fluorouridine
  modified_base 2^3: mod_base = OTHER; note = phosphorothioate linkage
  modified_base 3: mod_base = OTHER; note = 2'-O-methyladenosine
  modified_base 3^4: mod_base = OTHER; note = phosphorothioate linkage
  modified_base 4: mod_base = OTHER; note = 2'-fluorocytidine
  modified_base 5: mod_base = um
  modified_base 6: mod_base = OTHER; note = 2'-fluorocytidine
  modified_base 7: mod_base = cm
  modified_base 8: mod_base = OTHER; note = 2'-fluorocytidine
  modified_base 9: mod_base = um
  modified_base 10: mod_base = OTHER; note = 2'-fluorouridine
  modified_base 11: mod_base = cm
  modified_base 12: mod_base = OTHER; note = 2'-fluorouridine
  modified_base 13: mod_base = cm
  modified_base 14: mod_base = OTHER; note = 2'-fluoroadenosine
  modified_base 15: mod_base = um
  modified_base 16: mod_base = OTHER; note = 2'-fluorouridine
  modified_base 17: mod_base = OTHER; note = 2'-O-methyladenosine
  modified_base 18: mod_base = OTHER; note = 2'-fluoroguanosine
  modified_base 19: mod_base = gm
  modified_base 20: mod_base = OTHER; note = 2'-fluorocytidine
  modified_base 20^21: mod_base = OTHER; note = phosphorothioate linkage
  modified_base 21: mod_base = OTHER; note = 2'-O-methyladenosine
  source 1..21: mol_type = other RNA
atactcccttctcattaggca

SEQ ID NO: 599 - RNA, 21 nt, synthetic construct
  modified_base 1: mod_base = OTHER; note = 5 -cyclopropyl phosphonate-2 -O-methyluridine
  modified_base 1^2: mod_base = OTHER; note = phosphorothioate linkage
  modified_base 2: mod_base = OTHER; note = 2'-fluoroguanosine
  modified_base 2^3: mod_base = OTHER; note = phosphorothioate linkage
  modified_base 3: mod_base = OTHER; note = 2'-O-methyladenosine
  modified_base 3^4: mod_base = OTHER; note = phosphorothioate linkage
  modified_base 4: mod_base = OTHER; note = 2'-fluorouridine
  modified_base 5: mod_base = gm
  modified_base 6: mod_base = OTHER; note = 2'-fluorouridine
  modified_base 7: mod_base = um
  modified_base 8: mod_base = OTHER; note = 2'-fluorouridine
  modified_base 9: mod_base = um
  modified_base 10: mod_base = OTHER; note = 2'-fluoroguanosine
  modified_base 11: mod_base = OTHER; note = 2'-O-methyladenosine
  modified_base 12: mod_base = OTHER; note = 2'-fluoroguanosine
  modified_base 13: mod_base = cm
  modified_base 14: mod_base = OTHER; note = 2'-fluoroadenosine
  modified_base 15: mod_base = cm
  modified_base 16: mod_base = OTHER; note = 2'-fluorocytidine
  modified_base 17: mod_base = um
  modified_base 18: mod_base = OTHER; note = 2'-fluoroadenosine
  modified_base 19: mod_base = cm
  modified_base 20: mod_base = OTHER; note = 2'-fluorouridine
  modified_base 20^21: mod_base = OTHER; note = phosphorothioate linkage
  modified_base 21: mod_base = cm
  source 1..21: mol_type = other RNA
tgatgttttgagcacctactc

SEQ ID NO: 600 - RNA, 21 nt, synthetic construct
  modified_base 1: mod_base = um
  modified_base 1^2: mod_base = OTHER; note = phosphorothioate linkage
  modified_base 2: mod_base = OTHER; note = 2'-fluoroguanosine
  modified_base 2^3: mod_base = OTHER; note = phosphorothioate linkage
  modified_base 3: mod_base = OTHER; note = 2'-O-methyladenosine
  modified_base 3^4: mod_base = OTHER; note = phosphorothioate linkage
  modified_base 4: mod_base = um
  modified_base 5: mod_base = gm
  modified_base 6: mod_base = um
  modified_base 7: mod_base = um
  modified_base 8: mod_base = um
  modified_base 9: mod_base = um
  modified_base 10: mod_base = gm
  modified_base 11: mod_base = OTHER; note = 2'-O-methyladenosine
  modified_base 12: mod_base = OTHER; note = 2'-fluoroguanosine
  modified_base 13: mod_base = cm
  modified_base 14: mod_base = OTHER; note = 2'-fluoroadenosine
  modified_base 15: mod_base = cm
  modified_base 16: mod_base = OTHER; note = 2'-fluorocytidine
  modified_base 17: mod_base = um
  modified_base 18: mod_base = OTHER; note = 2'-O-methyladenosine
  modified_base 19: mod_base = cm
  modified_base 20: mod_base = um
  modified_base 20^21: mod_base = OTHER; note = phosphorothioate linkage
  modified_base 21: mod_base = cm
  source 1..21: mol_type = other RNA
tgatgttttgagcacctactc

SEQ ID NO: 601 - RNA, 21 nt, synthetic construct
  modified_base 1: mod_base = OTHER; note = 5 -cyclopropyl phosphonate-2 -O-methyluridine
  modified_base 1^2: mod_base = OTHER; note = phosphorothioate linkage
  modified_base 2: mod_base = OTHER; note = 2'-fluoroguanosine
  modified_base 2^3: mod_base = OTHER; note = phosphorothioate linkage
  modified_base 3: mod_base = OTHER; note = 2'-O-methyladenosine
  modified_base 3^4: mod_base = OTHER; note = phosphorothioate linkage
  modified_base 4: mod_base = um
  modified_base 5: mod_base = gm
  modified_base 6: mod_base = um
  modified_base 7: mod_base = um
  modified_base 8: mod_base = um
  modified_base 9: mod_base = um
  modified_base 10: mod_base = gm
  modified_base 11: mod_base = OTHER; note = 2'-O-methyladenosine
  modified_base 12: mod_base = OTHER; note = 2'-fluoroguanosine
  modified_base 13: mod_base = cm
  modified_base 14: mod_base = OTHER; note = 2'-fluoroadenosine
  modified_base 15: mod_base = cm
  modified_base 16: mod_base = OTHER; note = 2'-fluorocytidine
  modified_base 17: mod_base = um
  modified_base 18: mod_base = OTHER; note = 2'-O-methyladenosine
  modified_base 19: mod_base = cm
  modified_base 20: mod_base = um
  modified_base 20^21: mod_base = OTHER; note = phosphorothioate linkage
  modified_base 21: mod_base = cm
  source 1..21: mol_type = other RNA
tgatgttttgagcacctactc

SEQ ID NO: 602 - RNA, 21 nt, synthetic construct
  modified_base 1: mod_base = OTHER; note = 5 -cyclopropyl phosphonate-2 -O-methyluridine
  modified_base 1^2: mod_base = OTHER; note = phosphorothioate linkage
  modified_base 2: mod_base = OTHER; note = 2'-fluorouridine
  modified_base 2^3: mod_base = OTHER; note = phosphorothioate linkage
  modified_base 3: mod_base = cm
  modified_base 3^4: mod_base = OTHER; note = phosphorothioate linkage
  modified_base 4: mod_base = OTHER; note = 2'-fluorocytidine
  modified_base 5: mod_base = OTHER; note = 2'-O-methyladenosine
  modified_base 6: mod_base = OTHER; note = 2'-fluorouridine
  modified_base 7: mod_base = um
  modified_base 8: mod_base = OTHER; note = 2'-fluorocytidine
  modified_base 9: mod_base = cm
  modified_base 10: mod_base = OTHER; note = 2'-fluorouridine
  modified_base 11: mod_base = gm
  modified_base 12: mod_base = OTHER; note = 2'-fluorouridine
  modified_base 13: mod_base = um
  modified_base 14: mod_base = OTHER; note = 2'-fluorocytidine
  modified_base 15: mod_base = OTHER; note = 2'-O-methyladenosine
  modified_base 16: mod_base = OTHER; note = 2'-fluorouridine
  modified_base 17: mod_base = um
  modified_base 18: mod_base = OTHER; note = 2'-fluoroguanosine
  modified_base 19: mod_base = cm
  modified_base 20: mod_base = OTHER; note = 2'-fluorocytidine
  modified_base 20^21: mod_base = OTHER; note = phosphorothioate linkage
  modified_base 21: mod_base = um
  source 1..21: mol_type = other RNA
ttccattcctgttcattgcct

SEQ ID NO: 603 - RNA, 21 nt, synthetic construct
  modified_base 1: mod_base = um
  modified_base 1^2: mod_base = OTHER; note = phosphorothioate linkage
  modified_base 2: mod_base = OTHER; note = 2'-fluorouridine
  modified_base 2^3: mod_base = OTHER; note = phosphorothioate linkage
  modified_base 3: mod_base = cm
  modified_base 3^4: mod_base = OTHER; note = phosphorothioate linkage
  modified_base 4: mod_base = cm
  modified_base 5: mod_base = OTHER; note = 2'-O-methyladenosine
  modified_base 6: mod_base = um
  modified_base 7: mod_base = um
  modified_base 8: mod_base = cm
  modified_base 9: mod_base = cm
  modified_base 10: mod_base = um
  modified_base 11: mod_base = gm
  modified_base 12: mod_base = OTHER; note = 2'-fluorouridine
  modified_base 13: mod_base = um
  modified_base 14: mod_base = OTHER; note = 2'-fluorocytidine
  modified_base 15: mod_base = OTHER; note = 2'-O-methyladenosine
  modified_base 16: mod_base = OTHER; note = 2'-fluorouridine
  modified_base 17: mod_base = um
  modified_base 18: mod_base = gm
  modified_base 19: mod_base = cm
  modified_base 20: mod_base = cm
  modified_base 20^21: mod_base = OTHER; note = phosphorothioate linkage
  modified_base 21: mod_base = um
  source 1..21: mol_type = other RNA
ttccattcctgttcattgcct

SEQ ID NO: 604 - RNA, 21 nt, synthetic construct
  modified_base 1: mod_base = OTHER; note = 5 -cyclopropyl phosphonate-2 -O-methyluridine
  modified_base 1^2: mod_base = OTHER; note = phosphorothioate linkage
  modified_base 2: mod_base = OTHER; note = 2'-fluorouridine
  modified_base 2^3: mod_base = OTHER; note = phosphorothioate linkage
  modified_base 3: mod_base = cm
  modified_base 3^4: mod_base = OTHER; note = phosphorothioate linkage
  modified_base 4: mod_base = cm
  modified_base 5: mod_base = OTHER; note = 2'-O-methyladenosine
  modified_base 6: mod_base = um
  modified_base 7: mod_base = um
  modified_base 8: mod_base = cm
  modified_base 9: mod_base = cm
  modified_base 10: mod_base = um
  modified_base 11: mod_base = gm
  modified_base 12: mod_base = OTHER; note = 2'-fluorouridine
  modified_base 13: mod_base = um
  modified_base 14: mod_base = OTHER; note = 2'-fluorocytidine
  modified_base 15: mod_base = OTHER; note = 2'-O-methyladenosine
  modified_base 16: mod_base = OTHER; note = 2'-fluorouridine
  modified_base 17: mod_base = um
  modified_base 18: mod_base = gm
  modified_base 19: mod_base = cm
  modified_base 20: mod_base = cm
  modified_base 20^21: mod_base = OTHER; note = phosphorothioate linkage
  modified_base 21: mod_base = um
  source 1..21: mol_type = other RNA
ttccattcctgttcattgcct

SEQ ID NO: 605 - RNA, 21 nt, synthetic construct
  modified_base 1: mod_base = um
  modified_base 1^2: mod_base = OTHER; note = phosphorothioate linkage
  modified_base 2: mod_base = OTHER; note = 2'-fluorouridine
  modified_base 2^3: mod_base = OTHER; note = phosphorothioate linkage
  modified_base 3: mod_base = cm
  modified_base 3^4: mod_base = OTHER; note = phosphorothioate linkage
  modified_base 4: mod_base = cm
  modified_base 5: mod_base = OTHER; note = 2'-O-methyladenosine
  modified_base 6: mod_base = um
  modified_base 7: mod_base = OTHER; note = 2 ,3 -seco-uridine
  modified_base 8: mod_base = cm
  modified_base 9: mod_base = cm
  modified_base 10: mod_base = um
  modified_base 11: mod_base = gm
  modified_base 12: mod_base = OTHER; note = 2'-fluorouridine
  modified_base 13: mod_base = um
  modified_base 14: mod_base = OTHER; note = 2'-fluorocytidine
  modified_base 15: mod_base = OTHER; note = 2'-O-methyladenosine
  modified_base 16: mod_base = OTHER; note = 2'-fluorouridine
  modified_base 17: mod_base = um
  modified_base 18: mod_base = gm
  modified_base 19: mod_base = cm
  modified_base 20: mod_base = cm
  modified_base 20^21: mod_base = OTHER; note = phosphorothioate linkage
  modified_base 21: mod_base = um
  source 1..21: mol_type = other RNA
ttccattcctgttcattgcct

SEQ ID NO: 606 - RNA, 21 nt, synthetic construct
  modified_base 1: mod_base = um
  modified_base 1^2: mod_base = OTHER; note = phosphorothioate linkage
  modified_base 2: mod_base = OTHER; note = 2'-fluorouridine
  modified_base 2^3: mod_base = OTHER; note = phosphorothioate linkage
  modified_base 3: mod_base = cm
  modified_base 3^4: mod_base = OTHER; note = phosphorothioate linkage
  modified_base 4: mod_base = cm
  modified_base 5: mod_base = OTHER; note = 2'-O-methyladenosine
  modified_base 6: mod_base = OTHER; note = 2 ,3 -seco-uridine
  modified_base 7: mod_base = um
  modified_base 8: mod_base = cm
  modified_base 9: mod_base = cm
  modified_base 10: mod_base = um
  modified_base 11: mod_base = gm
  modified_base 12: mod_base = OTHER; note = 2'-fluorouridine
  modified_base 13: mod_base = um
  modified_base 14: mod_base = OTHER; note = 2'-fluorocytidine
  modified_base 15: mod_base = OTHER; note = 2'-O-methyladenosine
  modified_base 16: mod_base = OTHER; note = 2'-fluorouridine
  modified_base 17: mod_base = um
  modified_base 18: mod_base = gm
  modified_base 19: mod_base = cm
  modified_base 20: mod_base = cm
  modified_base 20^21: mod_base = OTHER; note = phosphorothioate linkage
  modified_base 21: mod_base = um
  source 1..21: mol_type = other RNA
ttccattcctgttcattgcct

SEQ ID NO: 607 - RNA, 21 nt, synthetic construct
  modified_base 1: mod_base = um
  modified_base 1^2: mod_base = OTHER; note = phosphorothioate linkage
  modified_base 2: mod_base = OTHER; note = 2'-fluorouridine
  modified_base 2^3: mod_base = OTHER; note = phosphorothioate linkage
  modified_base 3: mod_base = cm
  modified_base 3^4: mod_base = OTHER; note = phosphorothioate linkage
  modified_base 4: mod_base = cm
  modified_base 5: mod_base = OTHER; note = 2'-O-methyladenosine
  modified_base 6: mod_base = um
  modified_base 7: mod_base = um
  modified_base 8: mod_base = cm
  modified_base 9: mod_base = cm
  modified_base 10: mod_base = um
  modified_base 11: mod_base = gm
  modified_base 12: mod_base = OTHER; note = 2'-fluorouridine
  modified_base 13: mod_base = um
  modified_base 14: mod_base = OTHER; note = 2'-fluorocytidine
  modified_base 15: mod_base = OTHER; note = 2'-O-methyladenosine
  modified_base 16: mod_base = OTHER; note = 2'-fluorouridine
  modified_base 17: mod_base = um
  modified_base 18: mod_base = gm
  modified_base 19: mod_base = cm
  modified_base 20: mod_base = cm
  modified_base 20^21: mod_base = OTHER; note = phosphorothioate linkage
  modified_base 21: mod_base = cm
  source 1..21: mol_type = other RNA
ttccattcctgttcattgccc

SEQ ID NO: 608 - RNA, 21 nt, synthetic construct
  modified_base 1: mod_base = um
  modified_base 1^2: mod_base = OTHER; note = phosphorothioate linkage
  modified_base 2: mod_base = OTHER; note = 2'-fluoroguanosine
  modified_base 2^3: mod_base = OTHER; note = phosphorothioate linkage
  modified_base 3: mod_base = OTHER; note = 2'-O-methyladenosine
  modified_base 3^4: mod_base = OTHER; note = phosphorothioate linkage
  modified_base 4: mod_base = um
  modified_base 5: mod_base = gm
  modified_base 6: mod_base = um
  modified_base 7: mod_base = um
  modified_base 8: mod_base = um
  modified_base 9: mod_base = um
  modified_base 10: mod_base = gm
  modified_base 11: mod_base = OTHER; note = 2'-O-methyladenosine
  modified_base 12: mod_base = OTHER; note = 2'-fluoroguanosine
  modified_base 13: mod_base = cm
  modified_base 14: mod_base = OTHER; note = 2'-fluoroadenosine
  modified_base 15: mod_base = cm
  modified_base 16: mod_base = OTHER; note = 2'-fluorocytidine
  modified_base 17: mod_base = um
  modified_base 18: mod_base = OTHER; note = 2'-O-methyladenosine
  modified_base 19: mod_base = cm
  modified_base 20: mod_base = um
  modified_base 20^21: mod_base = OTHER; note = phosphorothioate linkage
  modified_base 21: mod_base = gm
  source 1..21: mol_type = other RNA
tgatgttttgagcacctactg

SEQ ID NO: 609 - RNA, 21 nt, synthetic construct
  modified_base 1: mod_base = um
  modified_base 1^2: mod_base = OTHER; note = phosphorothioate linkage
  modified_base 2: mod_base = OTHER; note = 2'-fluoroguanosine
  modified_base 2^3: mod_base = OTHER; note = phosphorothioate linkage
  modified_base 3: mod_base = OTHER; note = 2'-O-methyladenosine
  modified_base 3^4: mod_base = OTHER; note = phosphorothioate linkage
  modified_base 4: mod_base = um
  modified_base 5: mod_base = gm
  modified_base 6: mod_base = um
  modified_base 7: mod_base = OTHER; note = 2 ,3 -seco-uridine
  modified_base 8: mod_base = um
  modified_base 9: mod_base = um
  modified_base 10: mod_base = gm
  modified_base 11: mod_base = OTHER; note = 2'-O-methyladenosine
  modified_base 12: mod_base = OTHER; note = 2'-fluoroguanosine
  modified_base 13: mod_base = cm
  modified_base 14: mod_base = OTHER; note = 2'-fluoroadenosine
  modified_base 15: mod_base = cm
  modified_base 16: mod_base = OTHER; note = 2'-fluorocytidine
  modified_base 17: mod_base = um
  modified_base 18: mod_base = OTHER; note = 2'-O-methyladenosine
  modified_base 19: mod_base = cm
  modified_base 20: mod_base = um
  modified_base 20^21: mod_base = OTHER; note = phosphorothioate linkage
  modified_base 21: mod_base = cm
  source 1..21: mol_type = other RNA
tgatgttttgagcacctactc

SEQ ID NO: 610 - RNA, 21 nt, synthetic construct
  modified_base 1: mod_base = um
  modified_base 1^2: mod_base = OTHER; note = phosphorothioate linkage
  modified_base 2: mod_base = OTHER; note = 2'-fluoroguanosine
  modified_base 2^3: mod_base = OTHER; note = phosphorothioate linkage
  modified_base 3: mod_base = OTHER; note = 2'-O-methyladenosine
  modified_base 3^4: mod_base = OTHER; note = phosphorothioate linkage
  modified_base 4: mod_base = um
  modified_base 5: mod_base = gm
  modified_base 6: mod_base = um
  modified_base 7: mod_base = um
  modified_base 8: mod_base = um
  modified_base 9: mod_base = um
  modified_base 10: mod_base = gm
  modified_base 11: mod_base = OTHER; note = 2'-O-methyladenosine
  modified_base 12: mod_base = OTHER; note = 2'-fluoroguanosine
  modified_base 13: mod_base = cm
  modified_base 14: mod_base = OTHER; note = 2'-fluoroadenosine
  modified_base 15: mod_base = cm
  modified_base 16: mod_base = OTHER; note = 2'-fluorocytidine
  modified_base 17: mod_base = um
  modified_base 18: mod_base = OTHER; note = 2'-O-methyladenosine
  modified_base 19: mod_base = cm
  modified_base 20: mod_base = um
  modified_base 20^21: mod_base = OTHER; note = phosphorothioate linkage
  modified_base 21: mod_base = OTHER; note = 2'-O-methyladenosine
  source 1..21: mol_type = other RNA
tgatgttttgagcacctacta

SEQ ID NO: 611 - RNA, 21 nt, synthetic construct
  modified_base 1: mod_base = um
  modified_base 1^2: mod_base = OTHER; note = phosphorothioate linkage
  modified_base 2: mod_base = OTHER; note = 2'-fluorouridine
  modified_base 2^3: mod_base = OTHER; note = phosphorothioate linkage
  modified_base 3: mod_base = cm
  modified_base 3^4: mod_base = OTHER; note = phosphorothioate linkage
  modified_base 4: mod_base = OTHER; note = 2'-fluorocytidine
  modified_base 5: mod_base = OTHER; note = 2'-O-methyladenosine
  modified_base 6: mod_base = OTHER; note = 2'-fluorouridine
  modified_base 7: mod_base = um
  modified_base 8: mod_base = cm
  modified_base 9: mod_base = cm
  modified_base 10: mod_base = um
  modified_base 11: mod_base = gm
  modified_base 12: mod_base = OTHER; note = 2'-fluorouridine
  modified_base 13: mod_base = um
  modified_base 14: mod_base = OTHER; note = 2'-fluorocytidine
  modified_base 15: mod_base = OTHER; note = 2'-O-methyladenosine
  modified_base 16: mod_base = OTHER; note = 2'-fluorouridine
  modified_base 17: mod_base = um
  modified_base 18: mod_base = OTHER; note = 2'-fluoroguanosine
  modified_base 19: mod_base = cm
  modified_base 20: mod_base = cm
  modified_base 20^21: mod_base = OTHER; note = phosphorothioate linkage
  modified_base 21: mod_base = um
  source 1..21: mol_type = other RNA
ttccattcctgttcattgcct

SEQ ID NO: 612 - RNA, 21 nt, synthetic construct
  modified_base 1: mod_base = OTHER; note = 5 -cyclopropyl phosphonate-2 -O-methyluridine
  modified_base 1^2: mod_base = OTHER; note = phosphorothioate linkage
  modified_base 2: mod_base = OTHER; note = 2'-fluorouridine
  modified_base 2^3: mod_base = OTHER; note = phosphorothioate linkage
  modified_base 3: mod_base = cm
  modified_base 3^4: mod_base = OTHER; note = phosphorothioate linkage
  modified_base 4: mod_base = OTHER; note = 2'-fluorocytidine
  modified_base 5: mod_base = OTHER; note = 2'-O-methyladenosine
  modified_base 6: mod_base = OTHER; note = 2'-fluorouridine
  modified_base 7: mod_base = um
  modified_base 8: mod_base = cm
  modified_base 9: mod_base = cm
  modified_base 10: mod_base = um
  modified_base 11: mod_base = gm
  modified_base 12: mod_base = OTHER; note = 2'-fluorouridine
  modified_base 13: mod_base = um
  modified_base 14: mod_base = OTHER; note = 2'-fluorocytidine
  modified_base 15: mod_base = OTHER; note = 2'-O-methyladenosine
  modified_base 16: mod_base = OTHER; note = 2'-fluorouridine
  modified_base 17: mod_base = um
  modified_base 18: mod_base = OTHER; note = 2'-fluoroguanosine
  modified_base 19: mod_base = cm
  modified_base 20: mod_base = cm
  modified_base 20^21: mod_base = OTHER; note = phosphorothioate linkage
  modified_base 21: mod_base = um
  source 1..21: mol_type = other RNA
ttccattcctgttcattgcct

SEQ ID NO: 613 - RNA, 21 nt, synthetic construct
  modified_base 1: mod_base = OTHER; note = 5 -cyclopropyl phosphonate-2 -O-methyluridine
  modified_base 2: mod_base = OTHER; note = 2'-fluorouridine
  modified_base 3: mod_base = cm
  modified_base 4: mod_base = OTHER; note = 2'-fluorocytidine
  modified_base 5: mod_base = OTHER; note = 2'-O-methyladenosine
  modified_base 6: mod_base = OTHER; note = 2'-fluorouridine
  modified_base 7: mod_base = um
  modified_base 8: mod_base = cm
  modified_base 9: mod_base = cm
  modified_base 10: mod_base = um
  modified_base 11: mod_base = gm
  modified_base 12: mod_base = OTHER; note = 2'-fluorouridine
  modified_base 13: mod_base = um
  modified_base 14: mod_base = OTHER; note = 2'-fluorocytidine
  modified_base 15: mod_base = OTHER; note = 2'-O-methyladenosine
  modified_base 16: mod_base = OTHER; note = 2'-fluorouridine
  modified_base 17: mod_base = um
  modified_base 18: mod_base = OTHER; note = 2'-fluoroguanosine
  modified_base 19: mod_base = cm
  modified_base 20: mod_base = cm
  modified_base 20^21: mod_base = OTHER; note = phosphorothioate linkage
  modified_base 21: mod_base = um
  source 1..21: mol_type = other RNA
ttccattcctgttcattgcct

SEQ ID NO: 614 - RNA, 21 nt, synthetic construct
  modified_base 1: mod_base = um
  modified_base 1^2: mod_base = OTHER; note = phosphorothioate linkage
  modified_base 2: mod_base = OTHER; note = 2'-fluorouridine
  modified_base 2^3: mod_base = OTHER; note = phosphorothioate linkage
  modified_base 3: mod_base = gm
  modified_base 3^4: mod_base = OTHER; note = phosphorothioate linkage
  modified_base 4: mod_base = OTHER; note = 2'-fluorouridine
  modified_base 5: mod_base = gm
  modified_base 6: mod_base = um
  modified_base 7: mod_base = um
  modified_base 8: mod_base = cm
  modified_base 9: mod_base = OTHER; note = 2'-O-methyladenosine
  modified_base 10: mod_base = gm
  modified_base 11: mod_base = um
  modified_base 12: mod_base = OTHER; note = 2'-fluorouridine
  modified_base 13: mod_base = um
  modified_base 14: mod_base = OTHER; note = 2'-fluorocytidine
  modified_base 15: mod_base = cm
  modified_base 16: mod_base = OTHER; note = 2'-fluoroadenosine
  modified_base 17: mod_base = um
  modified_base 18: mod_base = um
  modified_base 19: mod_base = cm
  modified_base 20: mod_base = cm
  modified_base 20^21: mod_base = OTHER; note = phosphorothioate linkage
  modified_base 21: mod_base = gm
  source 1..21: mol_type = other RNA
ttgtgttcagtttccattccg

SEQ ID NO: 615 - RNA, 21 nt, synthetic construct
  modified_base 1: mod_base = um
  modified_base 1^2: mod_base = OTHER; note = phosphorothioate linkage
  modified_base 2: mod_base = OTHER; note = 2'-fluorouridine
  modified_base 2^3: mod_base = OTHER; note = phosphorothioate linkage
  modified_base 3: mod_base = gm
  modified_base 3^4: mod_base = OTHER; note = phosphorothioate linkage
  modified_base 4: mod_base = um
  modified_base 5: mod_base = gm
  modified_base 6: mod_base = um
  modified_base 7: mod_base = OTHER; note = 2'-fluorouridine
  modified_base 8: mod_base = cm
  modified_base 9: mod_base = OTHER; note = 2'-O-methyladenosine
  modified_base 10: mod_base = gm
  modified_base 11: mod_base = um
  modified_base 12: mod_base = OTHER; note = 2'-fluorouridine
  modified_base 13: mod_base = um
  modified_base 14: mod_base = OTHER; note = 2'-fluorocytidine
  modified_base 15: mod_base = cm
  modified_base 16: mod_base = OTHER; note = 2'-fluoroadenosine
  modified_base 17: mod_base = um
  modified_base 18: mod_base = um
  modified_base 19: mod_base = cm
  modified_base 20: mod_base = cm
  modified_base 20^21: mod_base = OTHER; note = phosphorothioate linkage
  modified_base 21: mod_base = gm
  source 1..21: mol_type = other RNA
ttgtgttcagtttccattccg

SEQ ID NO: 616 - RNA, 21 nt, synthetic construct
  modified_base 1: mod_base = um
  modified_base 1^2: mod_base = OTHER; note = phosphorothioate linkage
  modified_base 2: mod_base = OTHER; note = 2'-fluoroguanosine
  modified_base 2^3: mod_base = OTHER; note = phosphorothioate linkage
  modified_base 3: mod_base = OTHER; note = 2'-O-methyladenosine
  modified_base 3^4: mod_base = OTHER; note = phosphorothioate linkage
  modified_base 4: mod_base = OTHER; note = 2'-fluorouridine
  modified_base 5: mod_base = gm
  modified_base 6: mod_base = um
  modified_base 7: mod_base = um
  modified_base 8: mod_base = um
  modified_base 9: mod_base = um
  modified_base 10: mod_base = gm
  modified_base 11: mod_base = OTHER; note = 2'-O-methyladenosine
  modified_base 12: mod_base = OTHER; note = 2'-fluoroguanosine
  modified_base 13: mod_base = cm
  modified_base 14: mod_base = OTHER; note = 2'-fluoroadenosine
  modified_base 15: mod_base = cm
  modified_base 16: mod_base = OTHER; note = 2'-fluorocytidine
  modified_base 17: mod_base = um
  modified_base 18: mod_base = OTHER; note = 2'-O-methyladenosine
  modified_base 19: mod_base = cm
  modified_base 20: mod_base = um
  modified_base 20^21: mod_base = OTHER; note = phosphorothioate linkage
  modified_base 21: mod_base = cm
  source 1..21: mol_type = other RNA
tgatgttttgagcacctactc

SEQ ID NO: 617 - RNA, 21 nt, synthetic construct
  modified_base 1: mod_base = um
  modified_base 1^2: mod_base = OTHER; note = phosphorothioate linkage
  modified_base 2: mod_base = OTHER; note = 2'-fluoroguanosine
  modified_base 2^3: mod_base = OTHER; note = phosphorothioate linkage
  modified_base 3: mod_base = OTHER; note = 2'-O-methyladenosine
  modified_base 3^4: mod_base = OTHER; note = phosphorothioate linkage
  modified_base 4: mod_base = um
  modified_base 5: mod_base = gm
  modified_base 6: mod_base = um
  modified_base 7: mod_base = um
  modified_base 8: mod_base = um
  modified_base 9: mod_base = um
  modified_base 10: mod_base = gm
  modified_base 11: mod_base = OTHER; note = 2'-O-methyladenosine
  modified_base 12: mod_base = OTHER; note = 2'-fluoroguanosine
  modified_base 13: mod_base = cm
  modified_base 14: mod_base = OTHER; note = 2'-fluoroadenosine
  modified_base 15: mod_base = cm
  modified_base 16: mod_base = OTHER; note = 2'-fluorocytidine
  modified_base 17: mod_base = um
  modified_base 18: mod_base = OTHER; note = 2'-fluoroadenosine
  modified_base 19: mod_base = cm
  modified_base 20: mod_base = um
  modified_base 20^21: mod_base = OTHER; note = phosphorothioate linkage
  modified_base 21: mod_base = cm
  source 1..21: mol_type = other RNA
tgatgttttgagcacctactc

SEQ ID NO: 618 - RNA, 21 nt, synthetic construct
  modified_base 1: mod_base = um
  modified_base 1^2: mod_base = OTHER; note = phosphorothioate linkage
  modified_base 2: mod_base = OTHER; note = 2'-fluoroguanosine
  modified_base 2^3: mod_base = OTHER; note = phosphorothioate linkage
  modified_base 3: mod_base = OTHER; note = 2'-O-methyladenosine
  modified_base 3^4: mod_base = OTHER; note = phosphorothioate linkage
  modified_base 4: mod_base = um
  modified_base 5: mod_base = gm
  modified_base 6: mod_base = um
  modified_base 7: mod_base = OTHER; note = 2'-fluorouridine
  modified_base 8: mod_base = um
  modified_base 9: mod_base = um
  modified_base 10: mod_base = gm
  modified_base 11: mod_base = OTHER; note = 2'-O-methyladenosine
  modified_base 12: mod_base = OTHER; note = 2'-fluoroguanosine
  modified_base 13: mod_base = cm
  modified_base 14: mod_base = OTHER; note = 2'-fluoroadenosine
  modified_base 15: mod_base = cm
  modified_base 16: mod_base = OTHER; note = 2'-fluorocytidine
  modified_base 17: mod_base = um
  modified_base 18: mod_base = OTHER; note = 2'-O-methyladenosine
  modified_base 19: mod_base = cm
  modified_base 20: mod_base = um
  modified_base 20^21: mod_base = OTHER; note = phosphorothioate linkage
  modified_base 21: mod_base = cm
  source 1..21: mol_type = other RNA
tgatgttttgagcacctactc

SEQ ID NO: 619 - RNA, 21 nt, synthetic construct
  modified_base 1: mod_base = OTHER; note = 5 -cyclopropyl phosphonate-2 -O-methyluridine
  modified_base 1^2: mod_base = OTHER; note = phosphorothioate linkage
  modified_base 2: mod_base = OTHER; note = 2'-fluorouridine
  modified_base 2^3: mod_base = OTHER; note = phosphorothioate linkage
  modified_base 3: mod_base = gm
  modified_base 3^4: mod_base = OTHER; note = phosphorothioate linkage
  modified_base 4: mod_base = um
  modified_base 5: mod_base = gm
  modified_base 6: mod_base = um
  modified_base 7: mod_base = um
  modified_base 8: mod_base = cm
  modified_base 9: mod_base = OTHER; note = 2'-O-methyladenosine
  modified_base 10: mod_base = gm
  modified_base 11: mod_base = um
  modified_base 12: mod_base = OTHER; note = 2'-fluorouridine
  modified_base 13: mod_base = um
  modified_base 14: mod_base = OTHER; note = 2'-fluorocytidine
  modified_base 15: mod_base = cm
  modified_base 16: mod_base = OTHER; note = 2'-fluoroadenosine
  modified_base 17: mod_base = um
  modified_base 18: mod_base = um
  modified_base 19: mod_base = cm
  modified_base 20: mod_base = cm
  modified_base 20^21: mod_base = OTHER; note = phosphorothioate linkage
  modified_base 21: mod_base = OTHER; note = 2'-O-methyladenosine
  source 1..21: mol_type = other RNA
ttgtgttcagtttccattcca

SEQ ID NO: 620 - RNA, 21 nt, synthetic construct
  modified_base 1: mod_base = OTHER; note = 5 -cyclopropyl phosphonate-2 -O-methyluridine
  modified_base 1^2: mod_base = OTHER; note = phosphorothioate linkage
  modified_base 2: mod_base = OTHER; note = 2'-fluoroadenosine
  modified_base 2^3: mod_base = OTHER; note = phosphorothioate linkage
  modified_base 3: mod_base = cm
  modified_base 3^4: mod_base = OTHER; note = phosphorothioate linkage
  modified_base 4: mod_base = OTHER; note = 2'-fluoroadenosine
  modified_base 5: mod_base = OTHER; note = 2'-O-methyladenosine
  modified_base 6: mod_base = OTHER; note = 2'-fluorouridine
  modified_base 7: mod_base = um
  modified_base 8: mod_base = um
  modified_base 9: mod_base = cm
  modified_base 10: mod_base = um
  modified_base 11: mod_base = gm
  modified_base 12: mod_base = OTHER; note = 2'-fluoroguanosine
  modified_base 13: mod_base = cm
  modified_base 14: mod_base = OTHER; note = 2'-fluorouridine
  modified_base 15: mod_base = um
  modified_base 16: mod_base = OTHER; note = 2'-fluorocytidine
  modified_base 17: mod_base = cm
  modified_base 18: mod_base = OTHER; note = 2'-fluorocytidine
  modified_base 19: mod_base = OTHER; note = 2'-O-methyladenosine
  modified_base 20: mod_base = gm
  modified_base 20^21: mod_base = OTHER; note = phosphorothioate linkage
  modified_base 21: mod_base = gm
  source 1..21: mol_type = other RNA
tacaatttctggcttcccagg

SEQ ID NO: 621 - RNA, 21 nt, synthetic construct
  modified_base 1: mod_base = OTHER; note = 5 -cyclopropyl phosphonate-2 -O-methyluridine
  modified_base 1^2: mod_base = OTHER; note = phosphorothioate linkage
  modified_base 2: mod_base = OTHER; note = 2'-fluorocytidine
  modified_base 2^3: mod_base = OTHER; note = phosphorothioate linkage
  modified_base 3: mod_base = um
  modified_base 3^4: mod_base = OTHER; note = phosphorothioate linkage
  modified_base 4: mod_base = OTHER; note = 2'-fluoroguanosine
  modified_base 5: mod_base = um
  modified_base 6: mod_base = OTHER; note = 2'-fluoroguanosine
  modified_base 7: mod_base = um
  modified_base 8: mod_base = um
  modified_base 9: mod_base = cm
  modified_base 10: mod_base = OTHER; note = 2'-O-methyladenosine
  modified_base 11: mod_base = gm
  modified_base 12: mod_base = OTHER; note = 2'-fluorouridine
  modified_base 13: mod_base = um
  modified_base 14: mod_base = OTHER; note = 2'-fluorouridine
  modified_base 15: mod_base = cm
  modified_base 16: mod_base = OTHER; note = 2'-fluorocytidine
  modified_base 17: mod_base = OTHER; note = 2'-O-methyladenosine
  modified_base 18: mod_base = OTHER; note = 2'-fluorouridine
  modified_base 19: mod_base = um
  modified_base 20: mod_base = cm
  modified_base 20^21: mod_base = OTHER; note = phosphorothioate linkage
  modified_base 21: mod_base = cm
  source 1..21: mol_type = other RNA
tctgtgttcagtttccattcc

SEQ ID NO: 622 - RNA, 21 nt, synthetic construct
  modified_base 1: mod_base = cm
  modified_base 1^2: mod_base = OTHER; note = phosphorothioate linkage
  modified_base 2: mod_base = gm
  modified_base 3: mod_base = gm
  modified_base 4: mod_base = OTHER; note = 2'-O-methyladenosine
  modified_base 5: mod_base = OTHER; note = 2'-O-methyladenosine
  modified_base 6: mod_base = um
  modified_base 7: mod_base = gm
  modified_base 8: mod_base = gm
  modified_base 9: mod_base = OTHER; note = 2'-fluoroadenosine
  modified_base 10: mod_base = OTHER; note = 2'-fluoroadenosine
  modified_base 11: mod_base = OTHER; note = 2'-fluoroadenosine
  modified_base 12: mod_base = cm
  modified_base 13: mod_base = um
  modified_base 14: mod_base = gm
  modified_base 15: mod_base = OTHER; note = 2'-O-methyladenosine
  modified_base 16: mod_base = OTHER; note = 2'-O-methyladenosine
  modified_base 17: mod_base = cm
  modified_base 18: mod_base = OTHER; note = 2'-O-methyladenosine
  modified_base 19: mod_base = cm
  modified_base 20: mod_base = OTHER; note = 2'-O-methyladenosine
  modified_base 21: mod_base = OTHER; note = 2'-O-methyladenosine
  source 1..21: mol_type = other RNA
cggaatggaaactgaacacaa

SEQ ID NO: 623 - RNA, 21 nt, synthetic construct
  modified_base 1: mod_base = gm
  modified_base 1^2: mod_base = OTHER; note = phosphorothioate linkage
  modified_base 2: mod_base = gm
  modified_base 3: mod_base = OTHER; note = 2'-O-methyladenosine
  modified_base 4: mod_base = OTHER; note = 2'-O-methyladenosine
  modified_base 5: mod_base = um
  modified_base 6: mod_base = gm
  modified_base 7: mod_base = gm
  modified_base 8: mod_base = OTHER; note = 2'-O-methyladenosine
  modified_base 9: mod_base = OTHER; note = 2'-fluoroadenosine
  modified_base 10: mod_base = OTHER; note = 2'-fluoroadenosine
  modified_base 11: mod_base = OTHER; note = 2'-fluorocytidine
  modified_base 12: mod_base = um
  modified_base 13: mod_base = gm
  modified_base 14: mod_base = OTHER; note = 2'-O-methyladenosine
  modified_base 15: mod_base = OTHER; note = 2'-O-methyladenosine
  modified_base 16: mod_base = cm
  modified_base 17: mod_base = OTHER; note = 2'-O-methyladenosine
  modified_base 18: mod_base = cm
  modified_base 19: mod_base = OTHER; note = 2'-O-methyladenosine
  modified_base 20: mod_base = OTHER; note = 2 -O-methylinosine
  modified_base 21: mod_base = OTHER; note = 2'-O-methyladenosine
  source 1..21: mol_type = other RNA
ggaatggaaactgaacacana

SEQ ID NO: 624 - RNA, 21 nt, synthetic construct
  modified_base 1: mod_base = OTHER; note = 2'-O-methyladenosine
  modified_base 1^2: mod_base = OTHER; note = phosphorothioate linkage
  modified_base 2: mod_base = cm
  modified_base 3: mod_base = cm
  modified_base 4: mod_base = OTHER; note = 2'-O-methyladenosine
  modified_base 5: mod_base = gm
  modified_base 6: mod_base = OTHER; note = 2'-O-methyladenosine
  modified_base 7: mod_base = um
  modified_base 8: mod_base = um
  modified_base 9: mod_base = OTHER; note = 2'-fluorocytidine
  modified_base 10: mod_base = OTHER; note = 2'-fluorocytidine
  modified_base 11: mod_base = OTHER; note = 2'-fluorouridine
  modified_base 12: mod_base = gm
  modified_base 13: mod_base = gm
  modified_base 14: mod_base = gm
  modified_base 15: mod_base = OTHER; note = 2'-O-methyladenosine
  modified_base 16: mod_base = OTHER; note = 2'-O-methyladenosine
  modified_base 17: mod_base = OTHER; note = 2 -O-methylinosine
  modified_base 18: mod_base = cm
  modified_base 19: mod_base = cm
  modified_base 20: mod_base = OTHER; note = 2'-O-methyladenosine
  modified_base 21: mod_base = OTHER; note = 2'-O-methyladenosine
  source 1..21: mol_type = other RNA
accagattcctgggaanccaa

SEQ ID NO: 625 - RNA, 21 nt, synthetic construct
  modified_base 1: mod_base = um
  modified_base 1^2: mod_base = OTHER; note = phosphorothioate linkage
  modified_base 2: mod_base = cm
  modified_base 3: mod_base = cm
  modified_base 4: mod_base = um
  modified_base 5: mod_base = gm
  modified_base 6: mod_base = gm
  modified_base 7: mod_base = gm
  modified_base 8: mod_base = OTHER; note = 2'-O-methyladenosine
  modified_base 9: mod_base = OTHER; note = 2'-fluoroadenosine
  modified_base 10: mod_base = OTHER; note = 2'-fluoroguanosine
  modified_base 11: mod_base = OTHER; note = 2'-fluorocytidine
  modified_base 12: mod_base = cm
  modified_base 13: mod_base = OTHER; note = 2'-O-methyladenosine
  modified_base 14: mod_base = gm
  modified_base 15: mod_base = OTHER; note = 2'-O-methyladenosine
  modified_base 16: mod_base = OTHER; note = 2'-O-methyladenosine
  modified_base 17: mod_base = OTHER; note = 2'-O-methyladenosine
  modified_base 18: mod_base = um
  modified_base 19: mod_base = um
  modified_base 20: mod_base = gm
  modified_base 21: mod_base = um
  source 1..21: mol_type = other RNA
tcctgggaagccagaaattgt

SEQ ID NO: 626 - RNA, 21 nt, synthetic construct
  modified_base 1: mod_base = gm
  modified_base 1^2: mod_base = OTHER; note = phosphorothioate linkage
  modified_base 2: mod_base = cm
  modified_base 3: mod_base = cm
  modified_base 4: mod_base = OTHER; note = 2'-O-methyladenosine
  modified_base 5: mod_base = cm
  modified_base 6: mod_base = um
  modified_base 7: mod_base = gm
  modified_base 8: mod_base = gm
  modified_base 9: mod_base = OTHER; note = 2'-fluorouridine
  modified_base 10: mod_base = OTHER; note = 2'-fluoroguanosine
  modified_base 11: mod_base = OTHER; note = 2'-fluorocytidine
  modified_base 12: mod_base = um
  modified_base 13: mod_base = gm
  modified_base 14: mod_base = OTHER; note = 2'-O-methyladenosine
  modified_base 15: mod_base = OTHER; note = 2'-O-methyladenosine
  modified_base 16: mod_base = gm
  modified_base 17: mod_base = um
  modified_base 18: mod_base = gm
  modified_base 19: mod_base = um
  modified_base 20: mod_base = OTHER; note = 2'-O-methyladenosine
  modified_base 21: mod_base = OTHER; note = 2'-O-methyladenosine
  source 1..21: mol_type = other RNA
gccactggtgctgaagtgtaa

SEQ ID NO: 627 - RNA, 21 nt, synthetic construct
  modified_base 1: mod_base = cm
  modified_base 1^2: mod_base = OTHER; note = phosphorothioate linkage
  modified_base 2: mod_base = gm
  modified_base 3: mod_base = gm
  modified_base 4: mod_base = OTHER; note = 2'-O-methyladenosine
  modified_base 5: mod_base = cm
  modified_base 6: mod_base = OTHER; note = 2'-O-methyladenosine
  modified_base 7: mod_base = gm
  modified_base 8: mod_base = OTHER; note = 2'-O-methyladenosine
  modified_base 9: mod_base = OTHER; note = 2'-fluoroadenosine
  modified_base 10: mod_base = OTHER; note = 2'-fluoroguanosine
  modified_base 11: mod_base = OTHER; note = 2'-fluorocytidine
  modified_base 12: mod_base = um
  modified_base 13: mod_base = um
  modified_base 14: mod_base = gm
  modified_base 15: mod_base = gm
  modified_base 16: mod_base = OTHER; note = 2'-O-methyladenosine
  modified_base 17: mod_base = OTHER; note = 2'-O-methyladenosine
  modified_base 18: mod_base = gm
  modified_base 19: mod_base = OTHER; note = 2 -O-methylinosine
  modified_base 20: mod_base = um
  modified_base 21: mod_base = OTHER; note = 2'-O-methyladenosine
  source 1..21: mol_type = other RNA
cggacagaagcttggaagnta

SEQ ID NO: 628 - RNA, 21 nt, synthetic construct
  modified_base 1: mod_base = cm
  modified_base 1^2: mod_base = OTHER; note = phosphorothioate linkage
  modified_base 2: mod_base = OTHER; note = 2'-O-methyladenosine
  modified_base 3: mod_base = gm
  modified_base 4: mod_base = gm
  modified_base 5: mod_base = OTHER; note = 2'-O-methyladenosine
  modified_base 6: mod_base = um
  modified_base 7: mod_base = gm
  modified_base 8: mod_base = OTHER; note = 2'-O-methyladenosine
  modified_base 9: mod_base = OTHER; note = 2'-fluoroguanosine
  modified_base 10: mod_base = OTHER; note = 2'-fluoroguanosine
  modified_base 11: mod_base = OTHER; note = 2'-fluoroguanosine
  modified_base 12: mod_base = gm
  modified_base 13: mod_base = OTHER; note = 2'-O-methyladenosine
  modified_base 14: mod_base = um
  modified_base 15: mod_base = um
  modified_base 16: mod_base = um
  modified_base 17: mod_base = um
  modified_base 18: mod_base = cm
  modified_base 19: mod_base = cm
  modified_base 20: mod_base = OTHER; note = 2 -O-methylinosine
  modified_base 21: mod_base = OTHER; note = 2'-O-methyladenosine
  source 1..21: mol_type = other RNA
caggatgaggggattttccna

SEQ ID NO: 629 - RNA, 21 nt, synthetic construct
  modified_base 1: mod_base = OTHER; note = 2'-O-methyladenosine
  modified_base 1^2: mod_base = OTHER; note = phosphorothioate linkage
  modified_base 2: mod_base = gm
  modified_base 3: mod_base = OTHER; note = 2'-O-methyladenosine
  modified_base 4: mod_base = um
  modified_base 5: mod_base = um
  modified_base 6: mod_base = cm
  modified_base 7: mod_base = cm
  modified_base 8: mod_base = um
  modified_base 9: mod_base = OTHER; note = 2'-fluoroguanosine
  modified_base 10: mod_base = OTHER; note = 2'-fluoroguanosine
  modified_base 11: mod_base = OTHER; note = 2'-fluoroguanosine
  modified_base 12: mod_base = OTHER; note = 2'-O-methyladenosine
  modified_base 13: mod_base = OTHER; note = 2'-O-methyladenosine
  modified_base 14: mod_base = gm
  modified_base 15: mod_base = cm
  modified_base 16: mod_base = um
  modified_base 17: mod_base = OTHER; note = 2'-O-methyladenosine
  modified_base 18: mod_base = gm
  modified_base 19: mod_base = OTHER; note = 2'-O-methyladenosine
  modified_base 20: mod_base = OTHER; note = 2'-O-methyladenosine
  modified_base 21: mod_base = OTHER; note = 2'-O-methyladenosine
  source 1..21: mol_type = other RNA
agattcctgggaagctagaaa

SEQ ID NO: 630 - RNA, 21 nt, synthetic construct
  modified_base 1: mod_base = OTHER; note = 2 -O-methyl-2-aminoadenosine
  modified_base 1^2: mod_base = OTHER; note = phosphorothioate linkage
  modified_base 2: mod_base = gm
  modified_base 3: mod_base = OTHER; note = 2'-O-methyladenosine
  modified_base 4: mod_base = um
  modified_base 5: mod_base = um
  modified_base 6: mod_base = cm
  modified_base 7: mod_base = um
  modified_base 8: mod_base = gm
  modified_base 9: mod_base = OTHER; note = 2'-fluorocytidine
  modified_base 10: mod_base = OTHER; note = 2'-fluorocytidine
  modified_base 11: mod_base = OTHER; note = 2'-fluorouridine
  modified_base 12: mod_base = cm
  modified_base 13: mod_base = um
  modified_base 14: mod_base = gm
  modified_base 15: mod_base = OTHER; note = 2'-O-methyladenosine
  modified_base 16: mod_base = OTHER; note = 2'-O-methyladenosine
  modified_base 17: mod_base = cm
  modified_base 18: mod_base = um
  modified_base 19: mod_base = cm
  modified_base 20: mod_base = OTHER; note = 2'-O-methyladenosine
  modified_base 21: mod_base = OTHER; note = 2'-O-methyladenosine
  source 1..21: mol_type = other RNA
ngattctgcctctgaactcaa

SEQ ID NO: 631 - RNA, 21 nt, synthetic construct
  modified_base 1: mod_base = um
  modified_base 1^2: mod_base = OTHER; note = phosphorothioate linkage
  modified_base 2: mod_base = OTHER; note = 2'-O-methyladenosine
  modified_base 3: mod_base = cm
  modified_base 4: mod_base = cm
  modified_base 5: mod_base = cm
  modified_base 6: mod_base = um
  modified_base 7: mod_base = gm
  modified_base 8: mod_base = cm
  modified_base 9: mod_base = OTHER; note = 2'-fluoroadenosine
  modified_base 10: mod_base = OTHER; note = 2'-fluoroguanosine
  modified_base 11: mod_base = OTHER; note = 2'-fluoroguanosine
  modified_base 12: mod_base = gm
  modified_base 13: mod_base = OTHER; note = 2'-O-methyladenosine
  modified_base 14: mod_base = cm
  modified_base 15: mod_base = um
  modified_base 16: mod_base = cm
  modified_base 17: mod_base = um
  modified_base 18: mod_base = um
  modified_base 19: mod_base = OTHER; note = 2'-O-methyladenosine
  modified_base 20: mod_base = gm
  modified_base 21: mod_base = OTHER; note = 2'-O-methyladenosine
  source 1..21: mol_type = other RNA
taccctgcagggactcttaga

SEQ ID NO: 632 - RNA, 21 nt, synthetic construct
  modified_base 1: mod_base = OTHER; note = 2'-O-methyladenosine
  modified_base 1^2: mod_base = OTHER; note = phosphorothioate linkage
  modified_base 2: mod_base = cm
  modified_base 3: mod_base = cm
  modified_base 4: mod_base = cm
  modified_base 5: mod_base = um
  modified_base 6: mod_base = gm
  modified_base 7: mod_base = cm
  modified_base 8: mod_base = OTHER; note = 2'-O-methyladenosine
  modified_base 9: mod_base = OTHER; note = 2'-fluoroguanosine
  modified_base 10: mod_base = OTHER; note = 2'-fluoroguanosine
  modified_base 11: mod_base = OTHER; note = 2'-fluoroguanosine
  modified_base 12: mod_base = OTHER; note = 2'-O-methyladenosine
  modified_base 13: mod_base = cm
  modified_base 14: mod_base = um
  modified_base 15: mod_base = cm
  modified_base 16: mod_base = um
  modified_base 17: mod_base = um
  modified_base 18: mod_base = OTHER; note = 2'-O-methyladenosine
  modified_base 19: mod_base = OTHER; note = 2 -O-methylinosine
  modified_base 20: mod_base = cm
  modified_base 21: mod_base = um
  source 1..21: mol_type = other RNA
accctgcagggactcttanct

SEQ ID NO: 633 - RNA, 21 nt, synthetic construct
  modified_base 1: mod_base = um
  modified_base 1^2: mod_base = OTHER; note = phosphorothioate linkage
  modified_base 2: mod_base = cm
  modified_base 3: mod_base = cm
  modified_base 4: mod_base = cm
  modified_base 5: mod_base = OTHER; note = 2'-O-methyladenosine
  modified_base 6: mod_base = cm
  modified_base 7: mod_base = cm
  modified_base 8: mod_base = um
  modified_base 9: mod_base = OTHER; note = 2'-fluorouridine
  modified_base 10: mod_base = OTHER; note = 2'-fluorocytidine
  modified_base 11: mod_base = OTHER; note = 2'-fluorouridine
  modified_base 12: mod_base = cm
  modified_base 13: mod_base = cm
  modified_base 14: mod_base = um
  modified_base 15: mod_base = gm
  modified_base 16: mod_base = um
  modified_base 17: mod_base = OTHER; note = 2'-O-methyladenosine
  modified_base 18: mod_base = OTHER; note = 2 -O-methylinosine
  modified_base 19: mod_base = cm
  modified_base 20: mod_base = um
  modified_base 21: mod_base = um
  source 1..21: mol_type = other RNA
tcccaccttctcctgtanctt

SEQ ID NO: 634 - RNA, 21 nt, synthetic construct
  modified_base 1: mod_base = OTHER; note = 2'-O-methyladenosine
  modified_base 1^2: mod_base = OTHER; note = phosphorothioate linkage
  modified_base 2: mod_base = cm
  modified_base 3: mod_base = cm
  modified_base 4: mod_base = um
  modified_base 5: mod_base = um
  modified_base 6: mod_base = cm
  modified_base 7: mod_base = um
  modified_base 8: mod_base = cm
  modified_base 9: mod_base = OTHER; note = 2'-fluorocytidine
  modified_base 10: mod_base = OTHER; note = 2'-fluorouridine
  modified_base 11: mod_base = OTHER; note = 2'-fluoroguanosine
  modified_base 12: mod_base = um
  modified_base 13: mod_base = OTHER; note = 2'-O-methyladenosine
  modified_base 14: mod_base = gm
  modified_base 15: mod_base = cm
  modified_base 16: mod_base = um
  modified_base 17: mod_base = um
  modified_base 18: mod_base = cm
  modified_base 19: mod_base = OTHER; note = 2'-O-methyladenosine
  modified_base 20: mod_base = OTHER; note = 2 -O-methylinosine
  modified_base 21: mod_base = OTHER; note = 2'-O-methyladenosine
  source 1..21: mol_type = other RNA
accttctcctgtagcttcana

SEQ ID NO: 635 - RNA, 21 nt, synthetic construct
  modified_base 1: mod_base = gm
  modified_base 1^2: mod_base = OTHER; note = phosphorothioate linkage
  modified_base 2: mod_base = gm
  modified_base 3: mod_base = um
  modified_base 4: mod_base = gm
  modified_base 5: mod_base = cm
  modified_base 6: mod_base = um
  modified_base 7: mod_base = gm
  modified_base 8: mod_base = gm
  modified_base 9: mod_base = OTHER; note = 2'-fluorouridine
  modified_base 10: mod_base = OTHER; note = 2'-fluorocytidine
  modified_base 11: mod_base = OTHER; note = 2'-fluorocytidine
  modified_base 12: mod_base = um
  modified_base 13: mod_base = cm
  modified_base 14: mod_base = OTHER; note = 2'-O-methyladenosine
  modified_base 15: mod_base = gm
  modified_base 16: mod_base = um
  modified_base 17: mod_base = cm
  modified_base 18: mod_base = um
  modified_base 19: mod_base = OTHER; note = 2 -O-methylinosine
  modified_base 20: mod_base = um
  modified_base 21: mod_base = OTHER; note = 2'-O-methyladenosine
  source 1..21: mol_type = other RNA
ggtgctggtcctcagtctnta

SEQ ID NO: 636 - RNA, 21 nt, synthetic construct
  modified_base 1: mod_base = gm
  modified_base 1^2: mod_base = OTHER; note = phosphorothioate linkage
  modified_base 2: mod_base = gm
  modified_base 3: mod_base = um
  modified_base 4: mod_base = gm
  modified_base 5: mod_base = cm
  modified_base 6: mod_base = um
  modified_base 7: mod_base = gm
  modified_base 8: mod_base = gm
  modified_base 9: mod_base = OTHER; note = 2'-fluorouridine
  modified_base 10: mod_base = OTHER; note = 2'-fluorocytidine
  modified_base 11: mod_base = OTHER; note = 2'-fluorocytidine
  modified_base 12: mod_base = um
  modified_base 13: mod_base = cm
  modified_base 14: mod_base = OTHER; note = 2'-O-methyladenosine
  modified_base 15: mod_base = gm
  modified_base 16: mod_base = um
  modified_base 17: mod_base = cm
  modified_base 18: mod_base = um
  modified_base 19: mod_base = gm
  modified_base 20: mod_base = um
  modified_base 21: mod_base = OTHER; note = 2'-O-methyladenosine
  source 1..21: mol_type = other RNA
ggtgctggtcctcagtctgta

SEQ ID NO: 637 - RNA, 21 nt, synthetic construct
  modified_base 1: mod_base = gm
  modified_base 1^2: mod_base = OTHER; note = phosphorothioate linkage
  modified_base 2: mod_base = um
  modified_base 3: mod_base = gm
  modified_base 4: mod_base = cm
  modified_base 5: mod_base = um
  modified_base 6: mod_base = gm
  modified_base 7: mod_base = gm
  modified_base 8: mod_base = um
  modified_base 9: mod_base = OTHER; note = 2'-fluorocytidine
  modified_base 10: mod_base = OTHER; note = 2'-fluorocytidine
  modified_base 11: mod_base = OTHER; note = 2'-fluorouridine
  modified_base 12: mod_base = cm
  modified_base 13: mod_base = OTHER; note = 2'-O-methyladenosine
  modified_base 14: mod_base = gm
  modified_base 15: mod_base = um
  modified_base 16: mod_base = cm
  modified_base 17: mod_base = um
  modified_base 18: mod_base = gm
  modified_base 19: mod_base = um
  modified_base 20: mod_base = OTHER; note = 2 -O-methylinosine
  modified_base 21: mod_base = OTHER; note = 2'-O-methyladenosine
  source 1..21: mol_type = other RNA
gtgctggtcctcagtctgtna

SEQ ID NO: 638 - RNA, 21 nt, synthetic construct
  modified_base 1: mod_base = gm
  modified_base 1^2: mod_base = OTHER; note = phosphorothioate linkage
  modified_base 2: mod_base = um
  modified_base 3: mod_base = gm
  modified_base 4: mod_base = cm
  modified_base 5: mod_base = um
  modified_base 6: mod_base = gm
  modified_base 7: mod_base = gm
  modified_base 8: mod_base = um
  modified_base 9: mod_base = OTHER; note = 2'-fluorocytidine
  modified_base 10: mod_base = OTHER; note = 2'-fluorocytidine
  modified_base 11: mod_base = OTHER; note = 2'-fluorouridine
  modified_base 12: mod_base = cm
  modified_base 13: mod_base = OTHER; note = 2'-O-methyladenosine
  modified_base 14: mod_base = gm
  modified_base 15: mod_base = um
  modified_base 16: mod_base = cm
  modified_base 17: mod_base = um
  modified_base 18: mod_base = OTHER; note = 2 -O-methylinosine
  modified_base 19: mod_base = um
  modified_base 20: mod_base = gm
  modified_base 21: mod_base = OTHER; note = 2'-O-methyladenosine
  source 1..21: mol_type = other RNA
gtgctggtcctcagtctntga

SEQ ID NO: 639 - RNA, 21 nt, synthetic construct
  modified_base 1: mod_base = cm
  modified_base 1^2: mod_base = OTHER; note = phosphorothioate linkage
  modified_base 2: mod_base = gm
  modified_base 3: mod_base = gm
  modified_base 4: mod_base = OTHER; note = 2'-O-methyladenosine
  modified_base 5: mod_base = OTHER; note = 2'-O-methyladenosine
  modified_base 6: mod_base = um
  modified_base 7: mod_base = gm
  modified_base 8: mod_base = gm
  modified_base 9: mod_base = OTHER; note = 2'-fluoroadenosine
  modified_base 10: mod_base = OTHER; note = 2'-fluoroadenosine
  modified_base 11: mod_base = OTHER; note = 2'-fluoroadenosine
  modified_base 12: mod_base = cm
  modified_base 13: mod_base = um
  modified_base 14: mod_base = gm
  modified_base 15: mod_base = OTHER; note = 2'-O-methyladenosine
  modified_base 16: mod_base = OTHER; note = 2'-O-methyladenosine
  modified_base 17: mod_base = cm
  modified_base 18: mod_base = OTHER; note = 2'-O-methyladenosine
  modified_base 19: mod_base = cm
  modified_base 20: mod_base = OTHER; note = 2'-O-methyladenosine
  modified_base 21: mod_base = OTHER; note = 2'-O-methyladenosine
  source 1..21: mol_type = other RNA
cggaatggaaactgaacacaa

SEQ ID NO: 640 - RNA, 21 nt, synthetic construct
  modified_base 1: mod_base = gm
  modified_base 1^2: mod_base = OTHER; note = phosphorothioate linkage
  modified_base 2: mod_base = gm
  modified_base 3: mod_base = gm
  modified_base 4: mod_base = OTHER; note = 2'-O-methyladenosine
  modified_base 5: mod_base = OTHER; note = 2'-O-methyladenosine
  modified_base 6: mod_base = um
  modified_base 7: mod_base = gm
  modified_base 8: mod_base = gm
  modified_base 9: mod_base = OTHER; note = 2'-fluoroadenosine
  modified_base 10: mod_base = OTHER; note = 2'-fluoroadenosine
  modified_base 11: mod_base = OTHER; note = 2'-fluoroadenosine
  modified_base 12: mod_base = cm
  modified_base 13: mod_base = um
  modified_base 14: mod_base = gm
  modified_base 15: mod_base = OTHER; note = 2'-O-methyladenosine
  modified_base 16: mod_base = OTHER; note = 2'-O-methyladenosine
  modified_base 17: mod_base = cm
  modified_base 18: mod_base = OTHER; note = 2'-O-methyladenosine
  modified_base 19: mod_base = cm
  modified_base 20: mod_base = OTHER; note = 2'-O-methyladenosine
  modified_base 21: mod_base = OTHER; note = 2'-O-methyladenosine
  source 1..21: mol_type = other RNA
gggaatggaaactgaacacaa

SEQ ID NO: 641 - RNA, 21 nt, synthetic construct
  modified_base 1: mod_base = cm
  modified_base 1^2: mod_base = OTHER; note = phosphorothioate linkage
  modified_base 2: mod_base = gm
  modified_base 3: mod_base = gm
  modified_base 4: mod_base = OTHER; note = 2'-O-methyladenosine
  modified_base 5: mod_base = OTHER; note = 2'-O-methyladenosine
  modified_base 6: mod_base = um
  modified_base 7: mod_base = gm
  modified_base 8: mod_base = gm
  modified_base 9: mod_base = OTHER; note = 2'-fluoroadenosine
  modified_base 10: mod_base = OTHER; note = 2'-fluoroadenosine
  modified_base 11: mod_base = OTHER; note = 2'-fluoroadenosine
  modified_base 12: mod_base = cm
  modified_base 13: mod_base = um
  modified_base 14: mod_base = OTHER; note = 2 -O-methylinosine
  modified_base 15: mod_base = OTHER; note = 2'-O-methyladenosine
  modified_base 16: mod_base = OTHER; note = 2'-O-methyladenosine
  modified_base 17: mod_base = cm
  modified_base 18: mod_base = OTHER; note = 2'-O-methyladenosine
  modified_base 19: mod_base = cm
  modified_base 20: mod_base = OTHER; note = 2'-O-methyladenosine
  modified_base 21: mod_base = OTHER; note = 2'-O-methyladenosine
  source 1..21: mol_type = other RNA
cggaatggaaactnaacacaa

SEQ ID NO: 642 - RNA, 21 nt, synthetic construct
  modified_base 1: mod_base = cm
  modified_base 1^2: mod_base = OTHER; note = phosphorothioate linkage
  modified_base 2: mod_base = gm
  modified_base 3: mod_base = gm
  modified_base 4: mod_base = OTHER; note = 2'-O-methyladenosine
  modified_base 5: mod_base = OTHER; note = 2'-O-methyladenosine
  modified_base 6: mod_base = um
  modified_base 7: mod_base = gm
  modified_base 8: mod_base = gm
  modified_base 9: mod_base = OTHER; note = 2'-fluoroadenosine
  modified_base 10: mod_base = OTHER; note = 2 -O-methyl-2-aminoadenosine
  modified_base 11: mod_base = OTHER; note = 2'-fluoroadenosine
  modified_base 12: mod_base = cm
  modified_base 13: mod_base = um
  modified_base 14: mod_base = OTHER; note = 2 -O-methylinosine
  modified_base 15: mod_base = OTHER; note = 2'-O-methyladenosine
  modified_base 16: mod_base = OTHER; note = 2'-O-methyladenosine
  modified_base 17: mod_base = cm
  modified_base 18: mod_base = OTHER; note = 2'-O-methyladenosine
  modified_base 19: mod_base = cm
  modified_base 20: mod_base = OTHER; note = 2'-O-methyladenosine
  modified_base 21: mod_base = OTHER; note = 2'-O-methyladenosine
  source 1..21: mol_type = other RNA
cggaatgganactnaacacaa

SEQ ID NO: 643 - RNA, 21 nt, synthetic construct
  modified_base 1: mod_base = cm
  modified_base 1^2: mod_base = OTHER; note = phosphorothioate linkage
  modified_base 2: mod_base = gm
  modified_base 3: mod_base = gm
  modified_base 4: mod_base = OTHER; note = 2'-O-methyladenosine
  modified_base 5: mod_base = OTHER; note = 2'-O-methyladenosine
  modified_base 6: mod_base = um
  modified_base 7: mod_base = gm
  modified_base 8: mod_base = gm
  modified_base 9: mod_base = OTHER; note = 2'-fluoroadenosine
  modified_base 10: mod_base = OTHER; note = 2'-fluoroadenosine
  modified_base 11: mod_base = OTHER; note = 2'-fluoroadenosine
  modified_base 12: mod_base = cm
  modified_base 13: mod_base = um
  modified_base 14: mod_base = gm
  modified_base 15: mod_base = OTHER; note = 2'-O-methyladenosine
  modified_base 16: mod_base = OTHER; note = 2'-O-methyladenosine
  modified_base 17: mod_base = um
  modified_base 18: mod_base = OTHER; note = 2'-O-methyladenosine
  modified_base 19: mod_base = cm
  modified_base 20: mod_base = OTHER; note = 2'-O-methyladenosine
  modified_base 21: mod_base = OTHER; note = 2'-O-methyladenosine
  source 1..21: mol_type = other RNA
cggaatggaaactgaatacaa

SEQ ID NO: 644 - RNA, 21 nt, synthetic construct
  modified_base 1: mod_base = cm
  modified_base 1^2: mod_base = OTHER; note = phosphorothioate linkage
  modified_base 2: mod_base = gm
  modified_base 3: mod_base = gm
  modified_base 4: mod_base = OTHER; note = 2'-O-methyladenosine
  modified_base 5: mod_base = OTHER; note = 2'-O-methyladenosine
  modified_base 6: mod_base = um
  modified_base 7: mod_base = OTHER; note = 2'-fluoroguanosine
  modified_base 8: mod_base = gm
  modified_base 9: mod_base = OTHER; note = 2'-fluoroadenosine
  modified_base 10: mod_base = OTHER; note = 2'-O-methyladenosine
  modified_base 11: mod_base = OTHER; note = 2'-fluoroadenosine
  modified_base 12: mod_base = cm
  modified_base 13: mod_base = um
  modified_base 14: mod_base = gm
  modified_base 15: mod_base = OTHER; note = 2'-O-methyladenosine
  modified_base 16: mod_base = OTHER; note = 2'-O-methyladenosine
  modified_base 17: mod_base = cm
  modified_base 18: mod_base = OTHER; note = 2'-O-methyladenosine
  modified_base 19: mod_base = cm
  modified_base 20: mod_base = OTHER; note = 2'-O-methyladenosine
  modified_base 21: mod_base = OTHER; note = 2'-O-methyladenosine
  source 1..21: mol_type = other RNA
cggaatggaaactgaacacaa

SEQ ID NO: 645 - RNA, 21 nt, synthetic construct
  modified_base 1: mod_base = um
  modified_base 1^2: mod_base = OTHER; note = phosphorothioate linkage
  modified_base 2: mod_base = cm
  modified_base 3: mod_base = cm
  modified_base 4: mod_base = um
  modified_base 5: mod_base = gm
  modified_base 6: mod_base = gm
  modified_base 7: mod_base = gm
  modified_base 8: mod_base = OTHER; note = 2'-O-methyladenosine
  modified_base 9: mod_base = OTHER; note = 2'-fluoroadenosine
  modified_base 10: mod_base = OTHER; note = 2'-fluoroguanosine
  modified_base 11: mod_base = OTHER; note = 2'-fluorocytidine
  modified_base 12: mod_base = cm
  modified_base 13: mod_base = OTHER; note = 2'-O-methyladenosine
  modified_base 14: mod_base = gm
  modified_base 15: mod_base = OTHER; note = 2'-O-methyladenosine
  modified_base 16: mod_base = OTHER; note = 2'-O-methyladenosine
  modified_base 17: mod_base = OTHER; note = 2'-O-methyladenosine
  modified_base 18: mod_base = um
  modified_base 19: mod_base = um
  modified_base 20: mod_base = gm
  modified_base 21: mod_base = um
  source 1..21: mol_type = other RNA
tcctgggaagccagaaattgt

SEQ ID NO: 646 - RNA, 21 nt, synthetic construct
  modified_base 1: mod_base = gm
  modified_base 1^2: mod_base = OTHER; note = phosphorothioate linkage
  modified_base 2: mod_base = OTHER; note = 2'-O-methyladenosine
  modified_base 3: mod_base = gm
  modified_base 4: mod_base = um
  modified_base 5: mod_base = OTHER; note = 2'-O-methyladenosine
  modified_base 6: mod_base = gm
  modified_base 7: mod_base = gm
  modified_base 8: mod_base = um
  modified_base 9: mod_base = OTHER; note = 2'-fluoroguanosine
  modified_base 10: mod_base = OTHER; note = 2'-fluorocytidine
  modified_base 11: mod_base = OTHER; note = 2'-fluorouridine
  modified_base 12: mod_base = cm
  modified_base 13: mod_base = OTHER; note = 2'-O-methyladenosine
  modified_base 14: mod_base = OTHER; note = 2'-O-methyladenosine
  modified_base 15: mod_base = OTHER; note = 2'-O-methyladenosine
  modified_base 16: mod_base = OTHER; note = 2'-O-methyladenosine
  modified_base 17: mod_base = cm
  modified_base 18: mod_base = OTHER; note = 2'-O-methyladenosine
  modified_base 19: mod_base = um
  modified_base 20: mod_base = cm
  modified_base 21: mod_base = OTHER; note = 2'-O-methyladenosine
  source 1..21: mol_type = other RNA
gagtaggtgctcaaaacatca

SEQ ID NO: 647 - RNA, 21 nt, synthetic construct
  modified_base 1: mod_base = OTHER; note = 2'-O-methyladenosine
  modified_base 1^2: mod_base = OTHER; note = phosphorothioate linkage
  modified_base 2: mod_base = gm
  modified_base 3: mod_base = gm
  modified_base 4: mod_base = cm
  modified_base 5: mod_base = OTHER; note = 2'-O-methyladenosine
  modified_base 6: mod_base = OTHER; note = 2'-O-methyladenosine
  modified_base 7: mod_base = um
  modified_base 8: mod_base = gm
  modified_base 9: mod_base = OTHER; note = 2'-fluoroadenosine
  modified_base 10: mod_base = OTHER; note = 2'-fluoroadenosine
  modified_base 11: mod_base = OTHER; note = 2'-fluorocytidine
  modified_base 12: mod_base = OTHER; note = 2'-O-methyladenosine
  modified_base 13: mod_base = gm
  modified_base 14: mod_base = gm
  modified_base 15: mod_base = OTHER; note = 2'-O-methyladenosine
  modified_base 16: mod_base = OTHER; note = 2'-O-methyladenosine
  modified_base 17: mod_base = um
  modified_base 18: mod_base = OTHER; note = 2 -O-methylinosine
  modified_base 19: mod_base = gm
  modified_base 20: mod_base = OTHER; note = 2'-O-methyladenosine
  modified_base 21: mod_base = OTHER; note = 2'-O-methyladenosine
  source 1..21: mol_type = other RNA
aggcaatgaacaggaatngaa

SEQ ID NO: 648 - RNA, 21 nt, synthetic construct
  modified_base 1: mod_base = OTHER; note = 2'-O-methyladenosine
  modified_base 1^2: mod_base = OTHER; note = phosphorothioate linkage
  modified_base 2: mod_base = gm
  modified_base 3: mod_base = um
  modified_base 4: mod_base = cm
  modified_base 5: mod_base = cm
  modified_base 6: mod_base = gm
  modified_base 7: mod_base = um
  modified_base 8: mod_base = gm
  modified_base 9: mod_base = OTHER; note = 2'-fluorouridine
  modified_base 10: mod_base = OTHER; note = 2'-fluorocytidine
  modified_base 11: mod_base = OTHER; note = 2'-fluorouridine
  modified_base 12: mod_base = OTHER; note = 2'-O-methyladenosine
  modified_base 13: mod_base = cm
  modified_base 14: mod_base = cm
  modified_base 15: mod_base = OTHER; note = 2'-O-methyladenosine
  modified_base 16: mod_base = OTHER; note = 2 -O-methylinosine
  modified_base 17: mod_base = OTHER; note = 2'-O-methyladenosine
  modified_base 18: mod_base = um
  modified_base 19: mod_base = um
  modified_base 20: mod_base = cm
  modified_base 21: mod_base = OTHER; note = 2'-O-methyladenosine
  source 1..21: mol_type = other RNA
agtccgtgtctaccanattca

SEQ ID NO: 649 - RNA, 21 nt, synthetic construct
  modified_base 1: mod_base = um
  modified_base 1^2: mod_base = OTHER; note = phosphorothioate linkage
  modified_base 2: mod_base = cm
  modified_base 3: mod_base = cm
  modified_base 4: mod_base = gm
  modified_base 5: mod_base = um
  modified_base 6: mod_base = gm
  modified_base 7: mod_base = um
  modified_base 8: mod_base = cm
  modified_base 9: mod_base = OTHER; note = 2'-fluorouridine
  modified_base 10: mod_base = OTHER; note = 2'-fluoroadenosine
  modified_base 11: mod_base = OTHER; note = 2'-fluorocytidine
  modified_base 12: mod_base = cm
  modified_base 13: mod_base = OTHER; note = 2'-O-methyladenosine
  modified_base 14: mod_base = gm
  modified_base 15: mod_base = OTHER; note = 2'-O-methyladenosine
  modified_base 16: mod_base = um
  modified_base 17: mod_base = um
  modified_base 18: mod_base = cm
  modified_base 19: mod_base = cm
  modified_base 20: mod_base = um
  modified_base 21: mod_base = OTHER; note = 2'-O-methyladenosine
  source 1..21: mol_type = other RNA
tccgtgtctaccagattccta

SEQ ID NO: 650 - RNA, 21 nt, synthetic construct
  modified_base 1: mod_base = cm
  modified_base 1^2: mod_base = OTHER; note = phosphorothioate linkage
  modified_base 2: mod_base = cm
  modified_base 3: mod_base = cm
  modified_base 4: mod_base = OTHER; note = 2'-O-methyladenosine
  modified_base 5: mod_base = cm
  modified_base 6: mod_base = cm
  modified_base 7: mod_base = um
  modified_base 8: mod_base = um
  modified_base 9: mod_base = OTHER; note = 2'-fluorocytidine
  modified_base 10: mod_base = OTHER; note = 2'-fluorouridine
  modified_base 11: mod_base = OTHER; note = 2'-fluorocytidine
  modified_base 12: mod_base = cm
  modified_base 13: mod_base = um
  modified_base 14: mod_base = gm
  modified_base 15: mod_base = um
  modified_base 16: mod_base = OTHER; note = 2'-O-methyladenosine
  modified_base 17: mod_base = OTHER; note = 2 -O-methylinosine
  modified_base 18: mod_base = cm
  modified_base 19: mod_base = um
  modified_base 20: mod_base = um
  modified_base 21: mod_base = OTHER; note = 2'-O-methyladenosine
  source 1..21: mol_type = other RNA
cccaccttctcctgtanctta

SEQ ID NO: 651 - RNA, 21 nt, synthetic construct
  modified_base 1: mod_base = cm
  modified_base 1^2: mod_base = OTHER; note = phosphorothioate linkage
  modified_base 2: mod_base = um
  modified_base 3: mod_base = cm
  modified_base 4: mod_base = cm
  modified_base 5: mod_base = um
  modified_base 6: mod_base = cm
  modified_base 7: mod_base = OTHER; note = 2'-O-methyladenosine
  modified_base 8: mod_base = OTHER; note = 2'-O-methyladenosine
  modified_base 9: mod_base = OTHER; note = 2'-fluoroadenosine
  modified_base 10: mod_base = OTHER; note = 2'-fluorouridine
  modified_base 11: mod_base = OTHER; note = 2'-fluorocytidine
  modified_base 12: mod_base = cm
  modified_base 13: mod_base = OTHER; note = 2'-O-methyladenosine
  modified_base 14: mod_base = cm
  modified_base 15: mod_base = um
  modified_base 16: mod_base = OTHER; note = 2 -O-methylinosine
  modified_base 17: mod_base = gm
  modified_base 18: mod_base = OTHER; note = 2'-O-methyladenosine
  modified_base 19: mod_base = um
  modified_base 20: mod_base = gm
  modified_base 21: mod_base = OTHER; note = 2'-O-methyladenosine
  source 1..21: mol_type = other RNA
ctcctcaaatccactngatga

SEQ ID NO: 652 - RNA, 21 nt, synthetic construct
  modified_base 1: mod_base = gm
  modified_base 1^2: mod_base = OTHER; note = phosphorothioate linkage
  modified_base 2: mod_base = gm
  modified_base 3: mod_base = um
  modified_base 4: mod_base = OTHER; note = 2'-O-methyladenosine
  modified_base 5: mod_base = gm
  modified_base 6: mod_base = OTHER; note = 2'-O-methyladenosine
  modified_base 7: mod_base = um
  modified_base 8: mod_base = um
  modified_base 9: mod_base = OTHER; note = 2'-fluorocytidine
  modified_base 10: mod_base = OTHER; note = 2'-fluorouridine
  modified_base 11: mod_base = OTHER; note = 2'-fluoroguanosine
  modified_base 12: mod_base = cm
  modified_base 13: mod_base = cm
  modified_base 14: mod_base = um
  modified_base 15: mod_base = cm
  modified_base 16: mod_base = um
  modified_base 17: mod_base = OTHER; note = 2 -O-methylinosine
  modified_base 18: mod_base = OTHER; note = 2'-O-methyladenosine
  modified_base 19: mod_base = OTHER; note = 2'-O-methyladenosine
  modified_base 20: mod_base = cm
  modified_base 21: mod_base = um
  source 1..21: mol_type = other RNA
ggtagattctgcctctnaact

SEQ ID NO: 653 - RNA, 21 nt, synthetic construct
  modified_base 1: mod_base = um
  modified_base 1^2: mod_base = OTHER; note = phosphorothioate linkage
  modified_base 2: mod_base = OTHER; note = 2'-O-methyladenosine
  modified_base 3: mod_base = gm
  modified_base 4: mod_base = OTHER; note = 2'-O-methyladenosine
  modified_base 5: mod_base = um
  modified_base 6: mod_base = um
  modified_base 7: mod_base = cm
  modified_base 8: mod_base = um
  modified_base 9: mod_base = OTHER; note = 2'-fluoroguanosine
  modified_base 10: mod_base = OTHER; note = 2'-fluorocytidine
  modified_base 11: mod_base = OTHER; note = 2'-fluorocytidine
  modified_base 12: mod_base = um
  modified_base 13: mod_base = cm
  modified_base 14: mod_base = um
  modified_base 15: mod_base = gm
  modified_base 16: mod_base = OTHER; note = 2'-O-methyladenosine
  modified_base 17: mod_base = OTHER; note = 2'-O-methyladenosine
  modified_base 18: mod_base = cm
  modified_base 19: mod_base = um
  modified_base 20: mod_base = cm
  modified_base 21: mod_base = OTHER; note = 2'-O-methyladenosine
  source 1..21: mol_type = other RNA
tagattctgcctctgaactca

SEQ ID NO: 654 - RNA, 21 nt, synthetic construct
  modified_base 1: mod_base = gm
  modified_base 1^2: mod_base = OTHER; note = phosphorothioate linkage
  modified_base 2: mod_base = gm
  modified_base 3: mod_base = cm
  modified_base 4: mod_base = um
  modified_base 5: mod_base = gm
  modified_base 6: mod_base = gm
  modified_base 7: mod_base = um
  modified_base 8: mod_base = gm
  modified_base 9: mod_base = OTHER; note = 2'-fluorouridine
  modified_base 10: mod_base = OTHER; note = 2'-fluorouridine
  modified_base 11: mod_base = OTHER; note = 2'-fluorocytidine
  modified_base 12: mod_base = cm
  modified_base 13: mod_base = cm
  modified_base 14: mod_base = OTHER; note = 2'-O-methyladenosine
  modified_base 15: mod_base = OTHER; note = 2'-O-methyladenosine
  modified_base 16: mod_base = um
  modified_base 17: mod_base = OTHER; note = 2'-O-methyladenosine
  modified_base 18: mod_base = OTHER; note = 2'-O-methyladenosine
  modified_base 19: mod_base = gm
  modified_base 20: mod_base = gm
  modified_base 21: mod_base = um
  source 1..21: mol_type = other RNA
ggctggtgttcccaataaggt

SEQ ID NO: 655 - RNA, 21 nt, synthetic construct
  modified_base 1: mod_base = cm
  modified_base 1^2: mod_base = OTHER; note = phosphorothioate linkage
  modified_base 2: mod_base = um
  modified_base 3: mod_base = gm
  modified_base 4: mod_base = gm
  modified_base 5: mod_base = um
  modified_base 6: mod_base = gm
  modified_base 7: mod_base = um
  modified_base 8: mod_base = um
  modified_base 9: mod_base = OTHER; note = 2'-fluorocytidine
  modified_base 10: mod_base = OTHER; note = 2'-fluorocytidine
  modified_base 11: mod_base = OTHER; note = 2'-fluorocytidine
  modified_base 12: mod_base = OTHER; note = 2'-O-methyladenosine
  modified_base 13: mod_base = OTHER; note = 2'-O-methyladenosine
  modified_base 14: mod_base = um
  modified_base 15: mod_base = OTHER; note = 2'-O-methyladenosine
  modified_base 16: mod_base = OTHER; note = 2'-O-methyladenosine
  modified_base 17: mod_base = gm
  modified_base 18: mod_base = OTHER; note = 2 -O-methylinosine
  modified_base 19: mod_base = um
  modified_base 20: mod_base = gm
  modified_base 21: mod_base = OTHER; note = 2'-O-methyladenosine
  source 1..21: mol_type = other RNA
ctggtgttcccaataagntga

SEQ ID NO: 656 - RNA, 21 nt, synthetic construct
  modified_base 1: mod_base = gm
  modified_base 1^2: mod_base = OTHER; note = phosphorothioate linkage
  modified_base 2: mod_base = cm
  modified_base 3: mod_base = um
  modified_base 4: mod_base = um
  modified_base 5: mod_base = OTHER; note = 2'-O-methyladenosine
  modified_base 6: mod_base = gm
  modified_base 7: mod_base = cm
  modified_base 8: mod_base = um
  modified_base 9: mod_base = OTHER; note = 2'-fluoroguanosine
  modified_base 10: mod_base = OTHER; note = 2'-fluoroguanosine
  modified_base 11: mod_base = OTHER; note = 2'-fluorocytidine
  modified_base 12: mod_base = OTHER; note = 2'-O-methyladenosine
  modified_base 13: mod_base = cm
  modified_base 14: mod_base = um
  modified_base 15: mod_base = um
  modified_base 16: mod_base = OTHER; note = 2 -O-methylinosine
  modified_base 17: mod_base = gm
  modified_base 18: mod_base = OTHER; note = 2'-O-methyladenosine
  modified_base 19: mod_base = um
  modified_base 20: mod_base = gm
  modified_base 21: mod_base = OTHER; note = 2'-O-methyladenosine
  source 1..21: mol_type = other RNA
gcttagctggcacttngatga

SEQ ID NO: 657 - RNA, 21 nt, synthetic construct
  modified_base 1: mod_base = cm
  modified_base 1^2: mod_base = OTHER; note = phosphorothioate linkage
  modified_base 2: mod_base = cm
  modified_base 3: mod_base = um
  modified_base 4: mod_base = OTHER; note = 2'-O-methyladenosine
  modified_base 5: mod_base = OTHER; note = 2'-O-methyladenosine
  modified_base 6: mod_base = um
  modified_base 7: mod_base = gm
  modified_base 8: mod_base = OTHER; note = 2'-O-methyladenosine
  modified_base 9: mod_base = OTHER; note = 2'-fluoroguanosine
  modified_base 10: mod_base = OTHER; note = 2'-fluoroadenosine
  modified_base 11: mod_base = OTHER; note = 2'-fluoroadenosine
  modified_base 12: mod_base = gm
  modified_base 13: mod_base = gm
  modified_base 14: mod_base = gm
  modified_base 15: mod_base = OTHER; note = 2'-O-methyladenosine
  modified_base 16: mod_base = OTHER; note = 2 -O-methylinosine
  modified_base 17: mod_base = um
  modified_base 18: mod_base = OTHER; note = 2'-O-methyladenosine
  modified_base 19: mod_base = um
  modified_base 20: mod_base = cm
  modified_base 21: mod_base = um
  source 1..21: mol_type = other RNA
cctaatgagaagggantatct

SEQ ID NO: 658 - RNA, 21 nt, synthetic construct
  modified_base 1: mod_base = gm
  modified_base 1^2: mod_base = OTHER; note = phosphorothioate linkage
  modified_base 2: mod_base = um
  modified_base 3: mod_base = gm
  modified_base 4: mod_base = OTHER; note = 2'-O-methyladenosine
  modified_base 5: mod_base = gm
  modified_base 6: mod_base = OTHER; note = 2'-O-methyladenosine
  modified_base 7: mod_base = OTHER; note = 2'-O-methyladenosine
  modified_base 8: mod_base = gm
  modified_base 9: mod_base = OTHER; note = 2'-fluoroguanosine
  modified_base 10: mod_base = OTHER; note = 2'-fluoroguanosine
  modified_base 11: mod_base = OTHER; note = 2'-fluoroadenosine
  modified_base 12: mod_base = gm
  modified_base 13: mod_base = um
  modified_base 14: mod_base = OTHER; note = 2'-O-methyladenosine
  modified_base 15: mod_base = um
  modified_base 16: mod_base = cm
  modified_base 17: mod_base = um
  modified_base 18: mod_base = OTHER; note = 2 -O-methylinosine
  modified_base 19: mod_base = um
  modified_base 20: mod_base = gm
  modified_base 21: mod_base = OTHER; note = 2'-O-methyladenosine
  source 1..21: mol_type = other RNA
gtgagaagggagtatctntga

SEQ ID NO: 659 - RNA, 21 nt, synthetic construct
  modified_base 1: mod_base = cm
  modified_base 1^2: mod_base = OTHER; note = phosphorothioate linkage
  modified_base 2: mod_base = OTHER; note = 2'-O-methyladenosine
  modified_base 3: mod_base = gm
  modified_base 4: mod_base = cm
  modified_base 5: mod_base = OTHER; note = 2'-O-methyladenosine
  modified_base 6: mod_base = um
  modified_base 7: mod_base = cm
  modified_base 8: mod_base = OTHER; note = 2'-O-methyladenosine
  modified_base 9: mod_base = OTHER; note = 2'-fluoroguanosine
  modified_base 10: mod_base = OTHER; note = 2'-fluorocytidine
  modified_base 11: mod_base = OTHER; note = 2'-fluoroadenosine
  modified_base 12: mod_base = um
  modified_base 13: mod_base = cm
  modified_base 14: mod_base = OTHER; note = 2'-O-methyladenosine
  modified_base 15: mod_base = um
  modified_base 16: mod_base = cm
  modified_base 17: mod_base = OTHER; note = 2 -O-methylinosine
  modified_base 18: mod_base = OTHER; note = 2'-O-methyladenosine
  modified_base 19: mod_base = OTHER; note = 2'-O-methyladenosine
  modified_base 20: mod_base = cm
  modified_base 21: mod_base = OTHER; note = 2'-O-methyladenosine
  source 1..21: mol_type = other RNA
cagcatcagcatcatcnaaca

SEQ ID NO: 660 - RNA, 21 nt, synthetic construct
  modified_base 1: mod_base = cm
  modified_base 2: mod_base = gm
  modified_base 3: mod_base = gm
  modified_base 4: mod_base = OTHER; note = 2'-O-methyladenosine
  modified_base 5: mod_base = OTHER; note = 2'-O-methyladenosine
  modified_base 6: mod_base = um
  modified_base 7: mod_base = gm
  modified_base 8: mod_base = gm
  modified_base 9: mod_base = OTHER; note = 2'-fluoroadenosine
  modified_base 10: mod_base = OTHER; note = 2'-fluoroadenosine
  modified_base 11: mod_base = OTHER; note = 2'-fluoroadenosine
  modified_base 12: mod_base = cm
  modified_base 13: mod_base = um
  modified_base 14: mod_base = gm
  modified_base 15: mod_base = OTHER; note = 2'-O-methyladenosine
  modified_base 16: mod_base = OTHER; note = 2'-O-methyladenosine
  modified_base 17: mod_base = cm
  modified_base 18: mod_base = OTHER; note = 2'-O-methyladenosine
  modified_base 19: mod_base = cm
  modified_base 20: mod_base = OTHER; note = 2'-O-methyladenosine
  modified_base 21: mod_base = OTHER; note = 2'-O-methyladenosine
  source 1..21: mol_type = other RNA
cggaatggaaactgaacacaa

SEQ ID NO: 661 - RNA, 21 nt, synthetic construct
  modified_base 1: mod_base = cm
  modified_base 1^2: mod_base = OTHER; note = phosphorothioate linkage
  modified_base 2: mod_base = gm
  modified_base 3: mod_base = gm
  modified_base 4: mod_base = OTHER; note = 2'-O-methyladenosine
  modified_base 5: mod_base = OTHER; note = 2'-O-methyladenosine
  modified_base 6: mod_base = um
  modified_base 7: mod_base = gm
  modified_base 8: mod_base = gm
  modified_base 9: mod_base = OTHER; note = 2'-fluoroadenosine
  modified_base 10: mod_base = OTHER; note = 2'-fluoroadenosine
  modified_base 11: mod_base = OTHER; note = 2'-fluoroadenosine
  modified_base 12: mod_base = cm
  modified_base 13: mod_base = um
  modified_base 14: mod_base = gm
  modified_base 15: mod_base = OTHER; note = 2'-O-methyladenosine
  modified_base 16: mod_base = OTHER; note = 2'-O-methyladenosine
  modified_base 17: mod_base = cm
  modified_base 18: mod_base = OTHER; note = 2'-O-methyladenosine
  modified_base 19: mod_base = cm
  modified_base 20: mod_base = OTHER; note = 2'-O-methyladenosine
  modified_base 21: mod_base = OTHER; note = 2'-O-methyladenosine
  source 1..21: mol_type = other RNA
cggaatggaaactgaacacaa

SEQ ID NO: 662 - RNA, 21 nt, synthetic construct
  modified_base 1: mod_base = cm
  modified_base 2: mod_base = gm
  modified_base 3: mod_base = gm
  modified_base 4: mod_base = OTHER; note = 2'-O-methyladenosine
  modified_base 5: mod_base = OTHER; note = 2'-O-methyladenosine
  modified_base 6: mod_base = um
  modified_base 7: mod_base = gm
  modified_base 8: mod_base = gm
  modified_base 9: mod_base = OTHER; note = 2'-fluoroadenosine
  modified_base 10: mod_base = OTHER; note = 2'-fluoroadenosine
  modified_base 11: mod_base = OTHER; note = 2'-fluoroadenosine
  modified_base 12: mod_base = cm
  modified_base 13: mod_base = um
  modified_base 14: mod_base = gm
  modified_base 15: mod_base = OTHER; note = 2'-O-methyladenosine
  modified_base 16: mod_base = OTHER; note = 2'-O-methyladenosine
  modified_base 17: mod_base = cm
  modified_base 18: mod_base = OTHER; note = 2'-O-methyladenosine
  modified_base 19: mod_base = cm
  modified_base 20: mod_base = OTHER; note = 2'-O-methyladenosine
  modified_base 21: mod_base = OTHER; note = 2'-O-methyladenosine
  source 1..21: mol_type = other RNA
cggaatggaaactgaacacaa

SEQ ID NO: 663 - RNA, 21 nt, synthetic construct
  modified_base 1: mod_base = cm
  modified_base 1^2: mod_base = OTHER; note = phosphorothioate linkage
  modified_base 2: mod_base = gm
  modified_base 3: mod_base = gm
  modified_base 4: mod_base = OTHER; note = 2'-O-methyladenosine
  modified_base 5: mod_base = OTHER; note = 2'-O-methyladenosine
  modified_base 6: mod_base = um
  modified_base 7: mod_base = OTHER; note = 2'-fluoroguanosine
  modified_base 8: mod_base = gm
  modified_base 9: mod_base = OTHER; note = 2'-fluoroadenosine
  modified_base 10: mod_base = OTHER; note = 2'-O-methyladenosine
  modified_base 11: mod_base = OTHER; note = 2'-fluoroadenosine
  modified_base 12: mod_base = cm
  modified_base 13: mod_base = um
  modified_base 14: mod_base = gm
  modified_base 15: mod_base = OTHER; note = 2'-O-methyladenosine
  modified_base 16: mod_base = OTHER; note = 2'-O-methyladenosine
  modified_base 17: mod_base = um
  modified_base 18: mod_base = OTHER; note = 2'-O-methyladenosine
  modified_base 19: mod_base = cm
  modified_base 20: mod_base = OTHER; note = 2'-O-methyladenosine
  modified_base 21: mod_base = OTHER; note = 2'-O-methyladenosine
  source 1..21: mol_type = other RNA
cggaatggaaactgaatacaa

SEQ ID NO: 664 - RNA, 21 nt, synthetic construct
  modified_base 1: mod_base = gm
  modified_base 1^2: mod_base = OTHER; note = phosphorothioate linkage
  modified_base 2: mod_base = gm
  modified_base 3: mod_base = gm
  modified_base 4: mod_base = OTHER; note = 2'-O-methyladenosine
  modified_base 5: mod_base = OTHER; note = 2'-O-methyladenosine
  modified_base 6: mod_base = um
  modified_base 7: mod_base = OTHER; note = 2'-fluoroguanosine
  modified_base 8: mod_base = gm
  modified_base 9: mod_base = OTHER; note = 2'-fluoroadenosine
  modified_base 10: mod_base = OTHER; note = 2'-O-methyladenosine
  modified_base 11: mod_base = OTHER; note = 2'-fluoroadenosine
  modified_base 12: mod_base = cm
  modified_base 13: mod_base = um
  modified_base 14: mod_base = gm
  modified_base 15: mod_base = OTHER; note = 2'-O-methyladenosine
  modified_base 16: mod_base = OTHER; note = 2'-O-methyladenosine
  modified_base 17: mod_base = cm
  modified_base 18: mod_base = OTHER; note = 2'-O-methyladenosine
  modified_base 19: mod_base = cm
  modified_base 20: mod_base = OTHER; note = 2'-O-methyladenosine
  modified_base 21: mod_base = OTHER; note = 2'-O-methyladenosine
  source 1..21: mol_type = other RNA
gggaatggaaactgaacacaa

SEQ ID NO: 665 - RNA, 21 nt, synthetic construct
  modified_base 1: mod_base = um
  modified_base 1^2: mod_base = OTHER; note = phosphorothioate linkage
  modified_base 2: mod_base = gm
  modified_base 3: mod_base = gm
  modified_base 4: mod_base = OTHER; note = 2'-O-methyladenosine
  modified_base 5: mod_base = OTHER; note = 2'-O-methyladenosine
  modified_base 6: mod_base = um
  modified_base 7: mod_base = OTHER; note = 2'-fluoroguanosine
  modified_base 8: mod_base = gm
  modified_base 9: mod_base = OTHER; note = 2'-fluoroadenosine
  modified_base 10: mod_base = OTHER; note = 2'-O-methyladenosine
  modified_base 11: mod_base = OTHER; note = 2'-fluoroadenosine
  modified_base 12: mod_base = cm
  modified_base 13: mod_base = um
  modified_base 14: mod_base = gm
  modified_base 15: mod_base = OTHER; note = 2'-O-methyladenosine
  modified_base 16: mod_base = OTHER; note = 2'-O-methyladenosine
  modified_base 17: mod_base = cm
  modified_base 18: mod_base = OTHER; note = 2'-O-methyladenosine
  modified_base 19: mod_base = cm
  modified_base 20: mod_base = OTHER; note = 2'-O-methyladenosine
  modified_base 21: mod_base = OTHER; note = 2'-O-methyladenosine
  source 1..21: mol_type = other RNA
tggaatggaaactgaacacaa

SEQ ID NO: 666 - RNA, 21 nt, synthetic construct
  modified_base 1: mod_base = cm
  modified_base 1^2: mod_base = OTHER; note = phosphorothioate linkage
  modified_base 2: mod_base = gm
  modified_base 3: mod_base = gm
  modified_base 4: mod_base = OTHER; note = 2'-O-methyladenosine
  modified_base 5: mod_base = OTHER; note = 2'-O-methyladenosine
  modified_base 6: mod_base = um
  modified_base 7: mod_base = OTHER; note = 2'-fluoroguanosine
  modified_base 8: mod_base = gm
  modified_base 9: mod_base = OTHER; note = 2'-fluoroadenosine
  modified_base 10: mod_base = OTHER; note = 2 -O-methyl-2-aminoadenosine
  modified_base 11: mod_base = OTHER; note = 2'-fluoroadenosine
  modified_base 12: mod_base = cm
  modified_base 13: mod_base = um
  modified_base 14: mod_base = gm
  modified_base 15: mod_base = OTHER; note = 2'-O-methyladenosine
  modified_base 16: mod_base = OTHER; note = 2'-O-methyladenosine
  modified_base 17: mod_base = cm
  modified_base 18: mod_base = OTHER; note = 2'-O-methyladenosine
  modified_base 19: mod_base = cm
  modified_base 20: mod_base = OTHER; note = 2'-O-methyladenosine
  modified_base 21: mod_base = OTHER; note = 2'-O-methyladenosine
  source 1..21: mol_type = other RNA
cggaatgganactgaacacaa

SEQ ID NO: 667 - RNA, 21 nt, synthetic construct
  modified_base 1: mod_base = cm
  modified_base 2: mod_base = gm
  modified_base 3: mod_base = gm
  modified_base 4: mod_base = OTHER; note = 2'-O-methyladenosine
  modified_base 5: mod_base = OTHER; note = 2'-O-methyladenosine
  modified_base 6: mod_base = um
  modified_base 7: mod_base = gm
  modified_base 8: mod_base = gm
  modified_base 9: mod_base = OTHER; note = 2'-fluoroadenosine
  modified_base 10: mod_base = OTHER; note = 2'-fluoroadenosine
  modified_base 11: mod_base = OTHER; note = 2'-fluoroadenosine
  modified_base 12: mod_base = cm
  modified_base 13: mod_base = um
  modified_base 14: mod_base = gm
  modified_base 15: mod_base = OTHER; note = 2'-O-methyladenosine
  modified_base 16: mod_base = OTHER; note = 2'-O-methyladenosine
  modified_base 17: mod_base = cm
  modified_base 18: mod_base = OTHER; note = 2'-O-methyladenosine
  modified_base 19: mod_base = cm
  modified_base 20: mod_base = OTHER; note = 2'-O-methyladenosine
  modified_base 21: mod_base = OTHER; note = 2'-O-methyladenosine
  source 1..21: mol_type = other RNA
cggaatggaaactgaacacaa

SEQ ID NO: 668 - RNA, 21 nt, synthetic construct
  modified_base 1: mod_base = cm
  modified_base 1^2: mod_base = OTHER; note = phosphorothioate linkage
  modified_base 2: mod_base = gm
  modified_base 3: mod_base = gm
  modified_base 4: mod_base = OTHER; note = 2'-O-methyladenosine
  modified_base 5: mod_base = OTHER; note = 2'-O-methyladenosine
  modified_base 6: mod_base = um
  modified_base 7: mod_base = gm
  modified_base 8: mod_base = gm
  modified_base 9: mod_base = OTHER; note = 2'-fluoroadenosine
  modified_base 10: mod_base = OTHER; note = 2'-fluoroadenosine
  modified_base 11: mod_base = OTHER; note = 2'-fluoroadenosine
  modified_base 12: mod_base = cm
  modified_base 13: mod_base = um
  modified_base 14: mod_base = gm
  modified_base 15: mod_base = OTHER; note = 2'-O-methyladenosine
  modified_base 16: mod_base = OTHER; note = 2'-O-methyladenosine
  modified_base 17: mod_base = cm
  modified_base 18: mod_base = OTHER; note = 2'-O-methyladenosine
  modified_base 19: mod_base = cm
  modified_base 20: mod_base = OTHER; note = 2'-O-methyladenosine
  modified_base 21: mod_base = OTHER; note = 2'-O-methyladenosine
  source 1..21: mol_type = other RNA
cggaatggaaactgaacacaa

SEQ ID NO: 669 - RNA, 21 nt, synthetic construct
  modified_base 1: mod_base = cm
  modified_base 1^2: mod_base = OTHER; note = phosphorothioate linkage
  modified_base 2: mod_base = gm
  modified_base 3: mod_base = gm
  modified_base 4: mod_base = OTHER; note = 2'-O-methyladenosine
  modified_base 5: mod_base = OTHER; note = 2'-O-methyladenosine
  modified_base 6: mod_base = um
  modified_base 7: mod_base = gm
  modified_base 8: mod_base = gm
  modified_base 9: mod_base = OTHER; note = 2'-fluoroadenosine
  modified_base 10: mod_base = OTHER; note = 2'-fluoroadenosine
  modified_base 11: mod_base = OTHER; note = 2'-fluoroadenosine
  modified_base 12: mod_base = cm
  modified_base 13: mod_base = um
  modified_base 14: mod_base = gm
  modified_base 15: mod_base = OTHER; note = 2'-O-methyladenosine
  modified_base 16: mod_base = OTHER; note = 2'-O-methyladenosine
  modified_base 17: mod_base = cm
  modified_base 18: mod_base = OTHER; note = 2'-O-methyladenosine
  modified_base 19: mod_base = cm
  modified_base 20: mod_base = OTHER; note = 2'-O-methyladenosine
  modified_base 21: mod_base = OTHER; note = 2'-O-methyladenosine
  source 1..21: mol_type = other RNA
cggaatggaaactgaacacaa

SEQ ID NO: 670 - RNA, 21 nt, synthetic construct
  modified_base 1: mod_base = cm
  modified_base 2: mod_base = gm
  modified_base 3: mod_base = gm
  modified_base 4: mod_base = OTHER; note = 2'-O-methyladenosine
  modified_base 5: mod_base = OTHER; note = 2'-O-methyladenosine
  modified_base 6: mod_base = um
  modified_base 7: mod_base = gm
  modified_base 8: mod_base = gm
  modified_base 9: mod_base = OTHER; note = 2'-fluoroadenosine
  modified_base 10: mod_base = OTHER; note = 2'-fluoroadenosine
  modified_base 11: mod_base = OTHER; note = 2'-fluoroadenosine
  modified_base 12: mod_base = cm
  modified_base 13: mod_base = um
  modified_base 14: mod_base = gm
  modified_base 15: mod_base = OTHER; note = 2'-O-methyladenosine
  modified_base 16: mod_base = OTHER; note = 2'-O-methyladenosine
  modified_base 17: mod_base = cm
  modified_base 18: mod_base = OTHER; note = 2'-O-methyladenosine
  modified_base 19: mod_base = cm
  modified_base 20: mod_base = OTHER; note = 2'-O-methyladenosine
  modified_base 21: mod_base = OTHER; note = 2'-O-methyladenosine
  source 1..21: mol_type = other RNA
cggaatggaaactgaacacaa

SEQ ID NO: 671 - RNA, 21 nt, synthetic construct
  modified_base 1: mod_base = cm
  modified_base 1^2: mod_base = OTHER; note = phosphorothioate linkage
  modified_base 2: mod_base = gm
  modified_base 3: mod_base = gm
  modified_base 4: mod_base = OTHER; note = 2'-O-methyladenosine
  modified_base 5: mod_base = OTHER; note = 2'-O-methyladenosine
  modified_base 6: mod_base = um
  modified_base 7: mod_base = gm
  modified_base 8: mod_base = gm
  modified_base 9: mod_base = OTHER; note = 2'-fluoroadenosine
  modified_base 10: mod_base = OTHER; note = 2'-fluoroadenosine
  modified_base 11: mod_base = OTHER; note = 2'-fluoroadenosine
  modified_base 12: mod_base = cm
  modified_base 13: mod_base = um
  modified_base 14: mod_base = gm
  modified_base 15: mod_base = OTHER; note = 2'-O-methyladenosine
  modified_base 16: mod_base = OTHER; note = 2'-O-methyladenosine
  modified_base 17: mod_base = cm
  modified_base 18: mod_base = OTHER; note = 2'-O-methyladenosine
  modified_base 19: mod_base = cm
  modified_base 20: mod_base = OTHER; note = 2'-O-methyladenosine
  modified_base 21: mod_base = OTHER; note = 2'-O-methyladenosine
  source 1..21: mol_type = other RNA
cggaatggaaactgaacacaa

SEQ ID NO: 672 - RNA, 21 nt, synthetic construct
  modified_base 1: mod_base = cm
  modified_base 2: mod_base = gm
  modified_base 3: mod_base = gm
  modified_base 4: mod_base = OTHER; note = 2'-O-methyladenosine
  modified_base 5: mod_base = OTHER; note = 2'-O-methyladenosine
  modified_base 6: mod_base = um
  modified_base 7: mod_base = gm
  modified_base 8: mod_base = gm
  modified_base 9: mod_base = OTHER; note = 2'-fluoroadenosine
  modified_base 10: mod_base = OTHER; note = 2'-fluoroadenosine
  modified_base 11: mod_base = OTHER; note = 2'-fluoroadenosine
  modified_base 12: mod_base = cm
  modified_base 13: mod_base = um
  modified_base 14: mod_base = gm
  modified_base 15: mod_base = OTHER; note = 2'-O-methyladenosine
  modified_base 16: mod_base = OTHER; note = 2'-O-methyladenosine
  modified_base 17: mod_base = cm
  modified_base 18: mod_base = OTHER; note = 2'-O-methyladenosine
  modified_base 19: mod_base = cm
  modified_base 20: mod_base = OTHER; note = 2'-O-methyladenosine
  modified_base 21: mod_base = OTHER; note = 2'-O-methyladenosine
  source 1..21: mol_type = other RNA
cggaatggaaactgaacacaa

SEQ ID NO: 673 - RNA, 21 nt, synthetic construct
  modified_base 1: mod_base = gm
  modified_base 1^2: mod_base = OTHER; note = phosphorothioate linkage
  modified_base 2: mod_base = OTHER; note = 2'-O-methyladenosine
  modified_base 3: mod_base = um
  modified_base 4: mod_base = gm
  modified_base 5: mod_base = OTHER; note = 2'-O-methyladenosine
  modified_base 6: mod_base = OTHER; note = 2'-O-methyladenosine
  modified_base 7: mod_base = cm
  modified_base 8: mod_base = OTHER; note = 2'-O-methyladenosine
  modified_base 9: mod_base = OTHER; note = 2'-fluoroguanosine
  modified_base 10: mod_base = OTHER; note = 2'-fluoroguanosine
  modified_base 11: mod_base = OTHER; note = 2'-fluoroadenosine
  modified_base 12: mod_base = OTHER; note = 2'-O-methyladenosine
  modified_base 13: mod_base = um
  modified_base 14: mod_base = gm
  modified_base 15: mod_base = gm
  modified_base 16: mod_base = OTHER; note = 2'-O-methyladenosine
  modified_base 17: mod_base = OTHER; note = 2'-O-methyladenosine
  modified_base 18: mod_base = OTHER; note = 2'-O-methyladenosine
  modified_base 19: mod_base = gm
  modified_base 20: mod_base = gm
  modified_base 21: mod_base = OTHER; note = 2'-O-methyladenosine
  source 1..21: mol_type = other RNA
gatgaacaggaatggaaagga

SEQ ID NO: 674 - RNA, 21 nt, synthetic construct
  modified_base 1: mod_base = gm
  modified_base 1^2: mod_base = OTHER; note = phosphorothioate linkage
  modified_base 2: mod_base = OTHER; note = 2'-O-methyladenosine
  modified_base 3: mod_base = um
  modified_base 4: mod_base = gm
  modified_base 5: mod_base = OTHER; note = 2'-O-methyladenosine
  modified_base 6: mod_base = OTHER; note = 2'-O-methyladenosine
  modified_base 7: mod_base = cm
  modified_base 8: mod_base = OTHER; note = 2'-O-methyladenosine
  modified_base 9: mod_base = OTHER; note = 2'-fluoroguanosine
  modified_base 10: mod_base = OTHER; note = 2'-fluoroguanosine
  modified_base 11: mod_base = OTHER; note = 2'-fluoroadenosine
  modified_base 12: mod_base = OTHER; note = 2'-O-methyladenosine
  modified_base 13: mod_base = um
  modified_base 14: mod_base = gm
  modified_base 15: mod_base = gm
  modified_base 16: mod_base = OTHER; note = 2'-O-methyladenosine
  modified_base 17: mod_base = OTHER; note = 2'-O-methyladenosine
  modified_base 18: mod_base = OTHER; note = 2'-O-methyladenosine
  modified_base 19: mod_base = gm
  modified_base 20: mod_base = OTHER; note = 2 -O-methylinosine
  modified_base 21: mod_base = OTHER; note = 2'-O-methyladenosine
  source 1..21: mol_type = other RNA
gatgaacaggaatggaaagna

SEQ ID NO: 675 - RNA, 21 nt, synthetic construct
  modified_base 1: mod_base = gm
  modified_base 1^2: mod_base = OTHER; note = phosphorothioate linkage
  modified_base 2: mod_base = OTHER; note = 2'-O-methyladenosine
  modified_base 3: mod_base = cm
  modified_base 4: mod_base = um
  modified_base 5: mod_base = OTHER; note = 2'-O-methyladenosine
  modified_base 6: mod_base = cm
  modified_base 7: mod_base = cm
  modified_base 8: mod_base = gm
  modified_base 9: mod_base = OTHER; note = 2'-fluoroadenosine
  modified_base 10: mod_base = OTHER; note = 2'-fluoroguanosine
  modified_base 11: mod_base = OTHER; note = 2'-fluorouridine
  modified_base 12: mod_base = cm
  modified_base 13: mod_base = cm
  modified_base 14: mod_base = gm
  modified_base 15: mod_base = um
  modified_base 16: mod_base = gm
  modified_base 17: mod_base = um
  modified_base 18: mod_base = cm
  modified_base 19: mod_base = um
  modified_base 20: mod_base = OTHER; note = 2'-O-methyladenosine
  modified_base 21: mod_base = OTHER; note = 2'-O-methyladenosine
  source 1..21: mol_type = other RNA
gactaccgagtccgtgtctaa

SEQ ID NO: 676 - RNA, 21 nt, synthetic construct
  modified_base 1: mod_base = um
  modified_base 1^2: mod_base = OTHER; note = phosphorothioate linkage
  modified_base 2: mod_base = gm
  modified_base 3: mod_base = cm
  modified_base 4: mod_base = cm
  modified_base 5: mod_base = um
  modified_base 6: mod_base = OTHER; note = 2'-O-methyladenosine
  modified_base 7: mod_base = OTHER; note = 2'-O-methyladenosine
  modified_base 8: mod_base = um
  modified_base 9: mod_base = OTHER; note = 2'-fluoroguanosine
  modified_base 10: mod_base = OTHER; note = 2'-fluoroadenosine
  modified_base 11: mod_base = OTHER; note = 2'-fluoroguanosine
  modified_base 12: mod_base = OTHER; note = 2'-O-methyladenosine
  modified_base 13: mod_base = OTHER; note = 2'-O-methyladenosine
  modified_base 14: mod_base = gm
  modified_base 15: mod_base = gm
  modified_base 16: mod_base = gm
  modified_base 17: mod_base = OTHER; note = 2'-O-methyladenosine
  modified_base 18: mod_base = gm
  modified_base 19: mod_base = um
  modified_base 20: mod_base = OTHER; note = 2'-O-methyladenosine
  modified_base 21: mod_base = um
  source 1..21: mol_type = other RNA
tgcctaatgagaagggagtat

SEQ ID NO: 677 - RNA, 21 nt, synthetic construct
  modified_base 1: mod_base = gm
  modified_base 1^2: mod_base = OTHER; note = phosphorothioate linkage
  modified_base 2: mod_base = OTHER; note = 2'-O-methyladenosine
  modified_base 3: mod_base = gm
  modified_base 4: mod_base = um
  modified_base 5: mod_base = OTHER; note = 2'-O-methyladenosine
  modified_base 6: mod_base = gm
  modified_base 7: mod_base = gm
  modified_base 8: mod_base = um
  modified_base 9: mod_base = OTHER; note = 2'-fluoroguanosine
  modified_base 10: mod_base = cm
  modified_base 11: mod_base = OTHER; note = 2'-fluorouridine
  modified_base 12: mod_base = cm
  modified_base 13: mod_base = OTHER; note = 2'-fluoroadenosine
  modified_base 14: mod_base = OTHER; note = 2'-O-methyladenosine
  modified_base 15: mod_base = OTHER; note = 2'-O-methyladenosine
  modified_base 16: mod_base = OTHER; note = 2'-O-methyladenosine
  modified_base 17: mod_base = cm
  modified_base 18: mod_base = OTHER; note = 2'-O-methyladenosine
  modified_base 19: mod_base = um
  modified_base 20: mod_base = cm
  modified_base 21: mod_base = OTHER; note = 2'-O-methyladenosine
  source 1..21: mol_type = other RNA
gagtaggtgctcaaaacatca

SEQ ID NO: 678 - RNA, 21 nt, synthetic construct
  modified_base 1: mod_base = gm
  modified_base 1^2: mod_base = OTHER; note = phosphorothioate linkage
  modified_base 2: mod_base = OTHER; note = 2'-O-methyladenosine
  modified_base 3: mod_base = gm
  modified_base 4: mod_base = um
  modified_base 5: mod_base = OTHER; note = 2'-O-methyladenosine
  modified_base 6: mod_base = gm
  modified_base 7: mod_base = OTHER; note = 2 -O-methylinosine
  modified_base 8: mod_base = um
  modified_base 9: mod_base = OTHER; note = 2'-fluoroguanosine
  modified_base 10: mod_base = cm
  modified_base 11: mod_base = OTHER; note = 2'-fluorouridine
  modified_base 12: mod_base = cm
  modified_base 13: mod_base = OTHER; note = 2'-fluoroadenosine
  modified_base 14: mod_base = OTHER; note = 2'-O-methyladenosine
  modified_base 15: mod_base = OTHER; note = 2'-O-methyladenosine
  modified_base 16: mod_base = OTHER; note = 2'-O-methyladenosine
  modified_base 17: mod_base = cm
  modified_base 18: mod_base = OTHER; note = 2'-O-methyladenosine
  modified_base 19: mod_base = um
  modified_base 20: mod_base = cm
  modified_base 21: mod_base = OTHER; note = 2'-O-methyladenosine
  source 1..21: mol_type = other RNA
gagtagntgctcaaaacatca

SEQ ID NO: 679 - RNA, 21 nt, synthetic construct
  modified_base 1: mod_base = gm
  modified_base 1^2: mod_base = OTHER; note = phosphorothioate linkage
  modified_base 2: mod_base = OTHER; note = 2'-O-methyladenosine
  modified_base 3: mod_base = gm
  modified_base 4: mod_base = um
  modified_base 5: mod_base = OTHER; note = 2'-O-methyladenosine
  modified_base 6: mod_base = gm
  modified_base 7: mod_base = OTHER; note = 2'-fluoroguanosine
  modified_base 8: mod_base = um
  modified_base 9: mod_base = OTHER; note = 2'-fluoroguanosine
  modified_base 10: mod_base = cm
  modified_base 11: mod_base = OTHER; note = 2'-fluorouridine
  modified_base 12: mod_base = cm
  modified_base 13: mod_base = OTHER; note = 2'-O-methyladenosine
  modified_base 14: mod_base = OTHER; note = 2'-O-methyladenosine
  modified_base 15: mod_base = OTHER; note = 2'-O-methyladenosine
  modified_base 16: mod_base = OTHER; note = 2'-O-methyladenosine
  modified_base 17: mod_base = cm
  modified_base 18: mod_base = OTHER; note = 2'-O-methyladenosine
  modified_base 19: mod_base = um
  modified_base 20: mod_base = cm
  modified_base 21: mod_base = OTHER; note = 2'-O-methyladenosine
  source 1..21: mol_type = other RNA
gagtaggtgctcaaaacatca

SEQ ID NO: 680 - RNA, 21 nt, synthetic construct
  modified_base 1: mod_base = gm
  modified_base 1^2: mod_base = OTHER; note = phosphorothioate linkage
  modified_base 2: mod_base = OTHER; note = 2'-O-methyladenosine
  modified_base 3: mod_base = gm
  modified_base 4: mod_base = um
  modified_base 5: mod_base = OTHER; note = 2'-O-methyladenosine
  modified_base 6: mod_base = gm
  modified_base 7: mod_base = gm
  modified_base 8: mod_base = um
  modified_base 9: mod_base = OTHER; note = 2'-fluoroguanosine
  modified_base 10: mod_base = cm
  modified_base 11: mod_base = OTHER; note = 2'-fluorouridine
  modified_base 12: mod_base = cm
  modified_base 13: mod_base = OTHER; note = 2'-O-methyladenosine
  modified_base 14: mod_base = OTHER; note = 2'-O-methyladenosine
  modified_base 15: mod_base = OTHER; note = 2'-O-methyladenosine
  modified_base 16: mod_base = OTHER; note = 2'-O-methyladenosine
  modified_base 17: mod_base = cm
  modified_base 18: mod_base = OTHER; note = 2'-O-methyladenosine
  modified_base 19: mod_base = um
  modified_base 20: mod_base = cm
  modified_base 21: mod_base = OTHER; note = 2'-O-methyladenosine
  source 1..21: mol_type = other RNA
gagtaggtgctcaaaacatca

SEQ ID NO: 681 - RNA, 21 nt, synthetic construct
  modified_base 1: mod_base = OTHER; note = 2'-O-methyladenosine
  modified_base 1^2: mod_base = OTHER; note = phosphorothioate linkage
  modified_base 2: mod_base = gm
  modified_base 3: mod_base = gm
  modified_base 4: mod_base = cm
  modified_base 5: mod_base = OTHER; note = 2'-O-methyladenosine
  modified_base 6: mod_base = OTHER; note = 2'-O-methyladenosine
  modified_base 7: mod_base = OTHER; note = 2'-fluorouridine
  modified_base 8: mod_base = gm
  modified_base 9: mod_base = OTHER; note = 2'-fluoroadenosine
  modified_base 10: mod_base = OTHER; note = 2'-O-methyladenosine
  modified_base 11: mod_base = OTHER; note = 2'-fluorocytidine
  modified_base 12: mod_base = OTHER; note = 2'-O-methyladenosine
  modified_base 13: mod_base = gm
  modified_base 14: mod_base = gm
  modified_base 15: mod_base = OTHER; note = 2'-O-methyladenosine
  modified_base 16: mod_base = OTHER; note = 2'-O-methyladenosine
  modified_base 17: mod_base = um
  modified_base 18: mod_base = OTHER; note = 2 -O-methylinosine
  modified_base 19: mod_base = gm
  modified_base 20: mod_base = OTHER; note = 2'-O-methyladenosine
  modified_base 21: mod_base = OTHER; note = 2'-O-methyladenosine
  source 1..21: mol_type = other RNA
aggcaatgaacaggaatngaa

SEQ ID NO: 682 - RNA, 21 nt, synthetic construct
  modified_base 1: mod_base = OTHER; note = 2'-O-methyladenosine
  modified_base 1^2: mod_base = OTHER; note = phosphorothioate linkage
  modified_base 2: mod_base = gm
  modified_base 3: mod_base = gm
  modified_base 4: mod_base = cm
  modified_base 5: mod_base = OTHER; note = 2'-O-methyladenosine
  modified_base 6: mod_base = OTHER; note = 2'-O-methyladenosine
  modified_base 7: mod_base = OTHER; note = 2'-fluorouridine
  modified_base 8: mod_base = gm
  modified_base 9: mod_base = OTHER; note = 2'-fluoroadenosine
  modified_base 10: mod_base = OTHER; note = 2'-O-methyladenosine
  modified_base 11: mod_base = OTHER; note = 2'-fluorocytidine
  modified_base 12: mod_base = OTHER; note = 2'-O-methyladenosine
  modified_base 13: mod_base = gm
  modified_base 14: mod_base = gm
  modified_base 15: mod_base = OTHER; note = 2'-O-methyladenosine
  modified_base 16: mod_base = OTHER; note = 2'-O-methyladenosine
  modified_base 17: mod_base = um
  modified_base 18: mod_base = gm
  modified_base 19: mod_base = gm
  modified_base 20: mod_base = OTHER; note = 2'-O-methyladenosine
  modified_base 21: mod_base = OTHER; note = 2'-O-methyladenosine
  source 1..21: mol_type = other RNA
aggcaatgaacaggaatggaa

SEQ ID NO: 683 - RNA, 21 nt, synthetic construct
  modified_base 1: mod_base = OTHER; note = 2'-O-methyladenosine
  modified_base 1^2: mod_base = OTHER; note = phosphorothioate linkage
  modified_base 2: mod_base = gm
  modified_base 3: mod_base = gm
  modified_base 4: mod_base = cm
  modified_base 5: mod_base = OTHER; note = 2'-O-methyladenosine
  modified_base 6: mod_base = OTHER; note = 2'-O-methyladenosine
  modified_base 7: mod_base = OTHER; note = 2'-fluorouridine
  modified_base 8: mod_base = gm
  modified_base 9: mod_base = OTHER; note = 2'-fluoroadenosine
  modified_base 10: mod_base = OTHER; note = 2'-O-methyladenosine
  modified_base 11: mod_base = OTHER; note = 2'-fluorocytidine
  modified_base 12: mod_base = OTHER; note = 2'-O-methyladenosine
  modified_base 13: mod_base = gm
  modified_base 14: mod_base = gm
  modified_base 15: mod_base = OTHER; note = 2'-O-methyladenosine
  modified_base 16: mod_base = OTHER; note = 2'-O-methyladenosine
  modified_base 17: mod_base = um
  modified_base 18: mod_base = gm
  modified_base 19: mod_base = OTHER; note = 2 -O-methylinosine
  modified_base 20: mod_base = OTHER; note = 2'-O-methyladenosine
  modified_base 21: mod_base = OTHER; note = 2'-O-methyladenosine
  source 1..21: mol_type = other RNA
aggcaatgaacaggaatgnaa

SEQ ID NO: 684 - RNA, 21 nt, synthetic construct
  modified_base 1: mod_base = OTHER; note = 2'-O-methyladenosine
  modified_base 1^2: mod_base = OTHER; note = phosphorothioate linkage
  modified_base 2: mod_base = gm
  modified_base 3: mod_base = gm
  modified_base 4: mod_base = cm
  modified_base 5: mod_base = OTHER; note = 2'-O-methyladenosine
  modified_base 6: mod_base = OTHER; note = 2'-O-methyladenosine
  modified_base 7: mod_base = OTHER; note = 2'-fluorouridine
  modified_base 8: mod_base = gm
  modified_base 9: mod_base = OTHER; note = 2'-fluoroadenosine
  modified_base 10: mod_base = OTHER; note = 2'-O-methyladenosine
  modified_base 11: mod_base = OTHER; note = 2'-fluorocytidine
  modified_base 12: mod_base = OTHER; note = 2'-O-methyladenosine
  modified_base 13: mod_base = gm
  modified_base 14: mod_base = OTHER; note = 2 -O-methylinosine
  modified_base 15: mod_base = OTHER; note = 2'-O-methyladenosine
  modified_base 16: mod_base = OTHER; note = 2'-O-methyladenosine
  modified_base 17: mod_base = um
  modified_base 18: mod_base = gm
  modified_base 19: mod_base = gm
  modified_base 20: mod_base = OTHER; note = 2'-O-methyladenosine
  modified_base 21: mod_base = OTHER; note = 2'-O-methyladenosine
  source 1..21: mol_type = other RNA
aggcaatgaacagnaatggaa

SEQ ID NO: 685 - RNA, 21 nt, synthetic construct
  modified_base 1: mod_base = OTHER; note = 2'-O-methyladenosine
  modified_base 1^2: mod_base = OTHER; note = phosphorothioate linkage
  modified_base 2: mod_base = gm
  modified_base 3: mod_base = gm
  modified_base 4: mod_base = cm
  modified_base 5: mod_base = OTHER; note = 2'-O-methyladenosine
  modified_base 6: mod_base = OTHER; note = 2'-O-methyladenosine
  modified_base 7: mod_base = OTHER; note = 2'-fluorouridine
  modified_base 8: mod_base = gm
  modified_base 9: mod_base = OTHER; note = 2'-fluoroadenosine
  modified_base 10: mod_base = OTHER; note = 2'-O-methyladenosine
  modified_base 11: mod_base = OTHER; note = 2'-fluorocytidine
  modified_base 12: mod_base = OTHER; note = 2'-O-methyladenosine
  modified_base 13: mod_base = OTHER; note = 2 -O-methylinosine
  modified_base 14: mod_base = gm
  modified_base 15: mod_base = OTHER; note = 2'-O-methyladenosine
  modified_base 16: mod_base = OTHER; note = 2'-O-methyladenosine
  modified_base 17: mod_base = um
  modified_base 18: mod_base = gm
  modified_base 19: mod_base = gm
  modified_base 20: mod_base = OTHER; note = 2'-O-methyladenosine
  modified_base 21: mod_base = OTHER; note = 2'-O-methyladenosine
  source 1..21: mol_type = other RNA
aggcaatgaacangaatggaa

SEQ ID NO: 686 - RNA, 21 nt, synthetic construct
  modified_base 1: mod_base = gm
  modified_base 1^2: mod_base = OTHER; note = phosphorothioate linkage
  modified_base 2: mod_base = gm
  modified_base 3: mod_base = gm
  modified_base 4: mod_base = cm
  modified_base 5: mod_base = OTHER; note = 2'-O-methyladenosine
  modified_base 6: mod_base = OTHER; note = 2'-O-methyladenosine
  modified_base 7: mod_base = OTHER; note = 2'-fluorouridine
  modified_base 8: mod_base = gm
  modified_base 9: mod_base = OTHER; note = 2'-fluoroadenosine
  modified_base 10: mod_base = OTHER; note = 2'-O-methyladenosine
  modified_base 11: mod_base = OTHER; note = 2'-fluorocytidine
  modified_base 12: mod_base = OTHER; note = 2'-O-methyladenosine
  modified_base 13: mod_base = gm
  modified_base 14: mod_base = gm
  modified_base 15: mod_base = OTHER; note = 2'-O-methyladenosine
  modified_base 16: mod_base = OTHER; note = 2'-O-methyladenosine
  modified_base 17: mod_base = um
  modified_base 18: mod_base = OTHER; note = 2 -O-methylinosine
  modified_base 19: mod_base = gm
  modified_base 20: mod_base = OTHER; note = 2'-O-methyladenosine
  modified_base 21: mod_base = OTHER; note = 2'-O-methyladenosine
  source 1..21: mol_type = other RNA
gggcaatgaacaggaatngaa

SEQ ID NO: 687 - RNA, 21 nt, synthetic construct
  modified_base 1: mod_base = cm
  modified_base 1^2: mod_base = OTHER; note = phosphorothioate linkage
  modified_base 2: mod_base = OTHER; note = 2'-O-methyladenosine
  modified_base 3: mod_base = gm
  modified_base 4: mod_base = um
  modified_base 5: mod_base = OTHER; note = 2'-O-methyladenosine
  modified_base 6: mod_base = gm
  modified_base 7: mod_base = OTHER; note = 2'-fluoroguanosine
  modified_base 8: mod_base = um
  modified_base 9: mod_base = OTHER; note = 2'-fluoroguanosine
  modified_base 10: mod_base = cm
  modified_base 11: mod_base = OTHER; note = 2'-fluorouridine
  modified_base 12: mod_base = cm
  modified_base 13: mod_base = OTHER; note = 2'-O-methyladenosine
  modified_base 14: mod_base = OTHER; note = 2'-O-methyladenosine
  modified_base 15: mod_base = OTHER; note = 2'-O-methyladenosine
  modified_base 16: mod_base = OTHER; note = 2'-O-methyladenosine
  modified_base 17: mod_base = cm
  modified_base 18: mod_base = OTHER; note = 2'-O-methyladenosine
  modified_base 19: mod_base = um
  modified_base 20: mod_base = cm
  modified_base 21: mod_base = OTHER; note = 2'-O-methyladenosine
  source 1..21: mol_type = other RNA
cagtaggtgctcaaaacatca

SEQ ID NO: 688 - RNA, 21 nt, synthetic construct
  modified_base 1: mod_base = um
  modified_base 1^2: mod_base = OTHER; note = phosphorothioate linkage
  modified_base 2: mod_base = OTHER; note = 2 -O-methyl-2-aminoadenosine
  modified_base 3: mod_base = gm
  modified_base 4: mod_base = um
  modified_base 5: mod_base = OTHER; note = 2'-O-methyladenosine
  modified_base 6: mod_base = gm
  modified_base 7: mod_base = OTHER; note = 2'-fluoroguanosine
  modified_base 8: mod_base = um
  modified_base 9: mod_base = OTHER; note = 2'-fluoroguanosine
  modified_base 10: mod_base = cm
  modified_base 11: mod_base = OTHER; note = 2'-fluorouridine
  modified_base 12: mod_base = cm
  modified_base 13: mod_base = OTHER; note = 2'-O-methyladenosine
  modified_base 14: mod_base = OTHER; note = 2'-O-methyladenosine
  modified_base 15: mod_base = OTHER; note = 2'-O-methyladenosine
  modified_base 16: mod_base = OTHER; note = 2'-O-methyladenosine
  modified_base 17: mod_base = cm
  modified_base 18: mod_base = OTHER; note = 2'-O-methyladenosine
  modified_base 19: mod_base = um
  modified_base 20: mod_base = cm
  modified_base 21: mod_base = OTHER; note = 2'-O-methyladenosine
  source 1..21: mol_type = other RNA
tngtaggtgctcaaaacatca

SEQ ID NO: 689 - RNA, 21 nt, synthetic construct
  modified_base 1: mod_base = gm
  modified_base 1^2: mod_base = OTHER; note = phosphorothioate linkage
  modified_base 2: mod_base = OTHER; note = 2'-O-methyladenosine
  modified_base 3: mod_base = gm
  modified_base 4: mod_base = um
  modified_base 5: mod_base = OTHER; note = 2'-O-methyladenosine
  modified_base 6: mod_base = gm
  modified_base 7: mod_base = gm
  modified_base 8: mod_base = um
  modified_base 9: mod_base = OTHER; note = 2'-fluoroguanosine
  modified_base 10: mod_base = cm
  modified_base 11: mod_base = OTHER; note = 2'-fluorouridine
  modified_base 12: mod_base = OTHER; note = 2'-fluorocytidine
  modified_base 13: mod_base = OTHER; note = 2'-O-methyladenosine
  modified_base 14: mod_base = OTHER; note = 2'-O-methyladenosine
  modified_base 15: mod_base = OTHER; note = 2'-O-methyladenosine
  modified_base 16: mod_base = OTHER; note = 2'-O-methyladenosine
  modified_base 17: mod_base = cm
  modified_base 18: mod_base = OTHER; note = 2'-O-methyladenosine
  modified_base 19: mod_base = um
  modified_base 20: mod_base = cm
  modified_base 21: mod_base = OTHER; note = 2'-O-methyladenosine
  source 1..21: mol_type = other RNA
gagtaggtgctcaaaacatca

SEQ ID NO: 690 - RNA, 21 nt, synthetic construct
  modified_base 1: mod_base = OTHER; note = 2'-O-methyladenosine
  modified_base 1^2: mod_base = OTHER; note = phosphorothioate linkage
  modified_base 2: mod_base = gm
  modified_base 3: mod_base = gm
  modified_base 4: mod_base = cm
  modified_base 5: mod_base = OTHER; note = 2'-O-methyladenosine
  modified_base 6: mod_base = OTHER; note = 2'-O-methyladenosine
  modified_base 7: mod_base = um
  modified_base 8: mod_base = gm
  modified_base 9: mod_base = OTHER; note = 2'-fluoroadenosine
  modified_base 10: mod_base = OTHER; note = 2'-fluoroadenosine
  modified_base 11: mod_base = OTHER; note = 2'-fluorocytidine
  modified_base 12: mod_base = OTHER; note = 2'-O-methyladenosine
  modified_base 13: mod_base = gm
  modified_base 14: mod_base = gm
  modified_base 15: mod_base = OTHER; note = 2'-O-methyladenosine
  modified_base 16: mod_base = OTHER; note = 2'-O-methyladenosine
  modified_base 17: mod_base = um
  modified_base 18: mod_base = gm
  modified_base 19: mod_base = gm
  modified_base 20: mod_base = OTHER; note = 2'-O-methyladenosine
  modified_base 21: mod_base = OTHER; note = 2'-O-methyladenosine
  source 1..21: mol_type = other RNA
aggcaatgaacaggaatggaa

SEQ ID NO: 691 - RNA, 21 nt, synthetic construct
  modified_base 1: mod_base = gm
  modified_base 1^2: mod_base = OTHER; note = phosphorothioate linkage
  modified_base 2: mod_base = OTHER; note = 2'-O-methyladenosine
  modified_base 3: mod_base = gm
  modified_base 4: mod_base = um
  modified_base 5: mod_base = OTHER; note = 2'-O-methyladenosine
  modified_base 6: mod_base = gm
  modified_base 7: mod_base = OTHER; note = 2'-fluoroguanosine
  modified_base 8: mod_base = um
  modified_base 9: mod_base = OTHER; note = 2'-fluoroguanosine
  modified_base 10: mod_base = cm
  modified_base 11: mod_base = OTHER; note = 2'-fluorouridine
  modified_base 12: mod_base = cm
  modified_base 13: mod_base = OTHER; note = 2'-O-methyladenosine
  modified_base 14: mod_base = OTHER; note = 2'-O-methyladenosine
  modified_base 15: mod_base = OTHER; note = 2'-O-methyladenosine
  modified_base 16: mod_base = OTHER; note = 2'-O-methyladenosine
  modified_base 17: mod_base = cm
  modified_base 18: mod_base = OTHER; note = 2'-O-methyladenosine
  modified_base 19: mod_base = um
  modified_base 20: mod_base = cm
  modified_base 21: mod_base = OTHER; note = 2'-O-methyladenosine
  source 1..21: mol_type = other RNA
gagtaggtgctcaaaacatca

SEQ ID NO: 692 - RNA, 21 nt, synthetic construct
  modified_base 1: mod_base = OTHER; note = 2'-O-methyladenosine
  modified_base 1^2: mod_base = OTHER; note = phosphorothioate linkage
  modified_base 2: mod_base = gm
  modified_base 3: mod_base = gm
  modified_base 4: mod_base = cm
  modified_base 5: mod_base = OTHER; note = 2'-O-methyladenosine
  modified_base 6: mod_base = OTHER; note = 2'-O-methyladenosine
  modified_base 7: mod_base = um
  modified_base 8: mod_base = gm
  modified_base 9: mod_base = OTHER; note = 2'-fluoroadenosine
  modified_base 10: mod_base = OTHER; note = 2'-fluoroadenosine
  modified_base 11: mod_base = OTHER; note = 2'-fluorocytidine
  modified_base 12: mod_base = OTHER; note = 2'-O-methyladenosine
  modified_base 13: mod_base = gm
  modified_base 14: mod_base = gm
  modified_base 15: mod_base = OTHER; note = 2'-O-methyladenosine
  modified_base 16: mod_base = OTHER; note = 2'-O-methyladenosine
  modified_base 17: mod_base = um
  modified_base 18: mod_base = OTHER; note = 2 -O-methylinosine
  modified_base 19: mod_base = gm
  modified_base 20: mod_base = OTHER; note = 2'-O-methyladenosine
  modified_base 21: mod_base = OTHER; note = 2'-O-methyladenosine
  source 1..21: mol_type = other RNA
aggcaatgaacaggaatngaa

SEQ ID NO: 693 - RNA, 21 nt, synthetic construct
  modified_base 1: mod_base = cm
  modified_base 1^2: mod_base = OTHER; note = phosphorothioate linkage
  modified_base 2: mod_base = gm
  modified_base 3: mod_base = gm
  modified_base 4: mod_base = OTHER; note = 2'-O-methyladenosine
  modified_base 5: mod_base = OTHER; note = 2'-O-methyladenosine
  modified_base 6: mod_base = um
  modified_base 7: mod_base = gm
  modified_base 8: mod_base = gm
  modified_base 9: mod_base = OTHER; note = 2'-fluoroadenosine
  modified_base 10: mod_base = OTHER; note = 2'-fluoroadenosine
  modified_base 11: mod_base = OTHER; note = 2'-fluoroadenosine
  modified_base 12: mod_base = cm
  modified_base 13: mod_base = um
  modified_base 14: mod_base = gm
  modified_base 15: mod_base = OTHER; note = 2'-O-methyladenosine
  modified_base 16: mod_base = OTHER; note = 2'-O-methyladenosine
  modified_base 17: mod_base = cm
  modified_base 18: mod_base = OTHER; note = 2'-O-methyladenosine
  modified_base 19: mod_base = cm
  modified_base 20: mod_base = OTHER; note = 2'-O-methyladenosine
  modified_base 21: mod_base = OTHER; note = 2'-O-methyladenosine
  source 1..21: mol_type = other RNA
cggaatggaaactgaacacaa

SEQ ID NO: 694 - RNA, 21 nt, synthetic construct
  modified_base 1: mod_base = cm
  modified_base 1^2: mod_base = OTHER; note = phosphorothioate linkage
  modified_base 2: mod_base = gm
  modified_base 3: mod_base = gm
  modified_base 4: mod_base = OTHER; note = 2'-O-methyladenosine
  modified_base 5: mod_base = OTHER; note = 2'-O-methyladenosine
  modified_base 6: mod_base = um
  modified_base 7: mod_base = gm
  modified_base 8: mod_base = gm
  modified_base 9: mod_base = OTHER; note = 2'-fluoroadenosine
  modified_base 10: mod_base = OTHER; note = 2'-O-methyladenosine
  modified_base 11: mod_base = OTHER; note = 2'-fluoroadenosine
  modified_base 12: mod_base = cm
  modified_base 13: mod_base = OTHER; note = 2'-fluorouridine
  modified_base 14: mod_base = gm
  modified_base 15: mod_base = OTHER; note = 2'-O-methyladenosine
  modified_base 16: mod_base = OTHER; note = 2'-O-methyladenosine
  modified_base 17: mod_base = cm
  modified_base 18: mod_base = OTHER; note = 2'-O-methyladenosine
  modified_base 19: mod_base = cm
  modified_base 20: mod_base = OTHER; note = 2'-O-methyladenosine
  modified_base 21: mod_base = OTHER; note = 2'-O-methyladenosine
  source 1..21: mol_type = other RNA
cggaatggaaactgaacacaa

SEQ ID NO: 695 - RNA, 21 nt, synthetic construct
  modified_base 1: mod_base = cm
  modified_base 1^2: mod_base = OTHER; note = phosphorothioate linkage
  modified_base 2: mod_base = cm
  modified_base 3: mod_base = um
  modified_base 4: mod_base = gm
  modified_base 5: mod_base = gm
  modified_base 6: mod_base = gm
  modified_base 7: mod_base = OTHER; note = 2'-O-methyladenosine
  modified_base 8: mod_base = OTHER; note = 2'-O-methyladenosine
  modified_base 9: mod_base = OTHER; note = 2'-fluoroguanosine
  modified_base 10: mod_base = OTHER; note = 2'-fluorocytidine
  modified_base 11: mod_base = OTHER; note = 2'-fluorocytidine
  modified_base 12: mod_base = OTHER; note = 2'-O-methyladenosine
  modified_base 13: mod_base = gm
  modified_base 14: mod_base = OTHER; note = 2'-O-methyladenosine
  modified_base 15: mod_base = OTHER; note = 2'-O-methyladenosine
  modified_base 16: mod_base = OTHER; note = 2'-O-methyladenosine
  modified_base 17: mod_base = um
  modified_base 18: mod_base = um
  modified_base 19: mod_base = gm
  modified_base 20: mod_base = um
  modified_base 21: mod_base = OTHER; note = 2'-O-methyladenosine
  source 1..21: mol_type = other RNA
cctgggaagccagaaattgta

SEQ ID NO: 696 - RNA, 21 nt, synthetic construct
  modified_base 1: mod_base = cm
  modified_base 1^2: mod_base = OTHER; note = phosphorothioate linkage
  modified_base 2: mod_base = gm
  modified_base 3: mod_base = gm
  modified_base 4: mod_base = OTHER; note = 2'-O-methyladenosine
  modified_base 5: mod_base = OTHER; note = 2'-O-methyladenosine
  modified_base 6: mod_base = um
  modified_base 7: mod_base = gm
  modified_base 8: mod_base = gm
  modified_base 9: mod_base = OTHER; note = 2'-fluoroadenosine
  modified_base 10: mod_base = OTHER; note = 2'-fluoroadenosine
  modified_base 11: mod_base = OTHER; note = 2'-fluoroadenosine
  modified_base 12: mod_base = cm
  modified_base 13: mod_base = um
  modified_base 14: mod_base = gm
  modified_base 15: mod_base = OTHER; note = 2'-O-methyladenosine
  modified_base 16: mod_base = OTHER; note = 2'-O-methyladenosine
  modified_base 17: mod_base = cm
  modified_base 18: mod_base = OTHER; note = 2'-O-methyladenosine
  modified_base 19: mod_base = cm
  modified_base 20: mod_base = OTHER; note = 2'-O-methyladenosine
  modified_base 21: mod_base = OTHER; note = 2'-O-methyladenosine
  source 1..21: mol_type = other RNA
cggaatggaaactgaacacaa

SEQ ID NO: 697 - RNA, 21 nt, synthetic construct
  modified_base 1: mod_base = cm
  modified_base 1^2: mod_base = OTHER; note = phosphorothioate linkage
  modified_base 2: mod_base = gm
  modified_base 3: mod_base = gm
  modified_base 4: mod_base = OTHER; note = 2'-O-methyladenosine
  modified_base 5: mod_base = OTHER; note = 2'-O-methyladenosine
  modified_base 6: mod_base = um
  modified_base 7: mod_base = gm
  modified_base 8: mod_base = gm
  modified_base 9: mod_base = OTHER; note = 2'-fluoroadenosine
  modified_base 10: mod_base = OTHER; note = 2'-fluoroadenosine
  modified_base 11: mod_base = OTHER; note = 2'-fluoroadenosine
  modified_base 12: mod_base = cm
  modified_base 13: mod_base = um
  modified_base 14: mod_base = gm
  modified_base 15: mod_base = OTHER; note = 2'-O-methyladenosine
  modified_base 16: mod_base = OTHER; note = 2'-O-methyladenosine
  modified_base 17: mod_base = cm
  modified_base 18: mod_base = OTHER; note = 2'-O-methyladenosine
  modified_base 19: mod_base = cm
  modified_base 20: mod_base = OTHER; note = 2'-O-methyladenosine
  modified_base 21: mod_base = OTHER; note = 2'-O-methyladenosine
  source 1..21: mol_type = other RNA
cggaatggaaactgaacacaa

SEQ ID NO: 698 - RNA, 21 nt, synthetic construct
  modified_base 1: mod_base = gm
  modified_base 1^2: mod_base = OTHER; note = phosphorothioate linkage
  modified_base 2: mod_base = gm
  modified_base 3: mod_base = OTHER; note = 2'-O-methyladenosine
  modified_base 4: mod_base = OTHER; note = 2'-O-methyladenosine
  modified_base 5: mod_base = um
  modified_base 6: mod_base = gm
  modified_base 7: mod_base = gm
  modified_base 8: mod_base = OTHER; note = 2'-O-methyladenosine
  modified_base 9: mod_base = OTHER; note = 2'-fluoroadenosine
  modified_base 10: mod_base = OTHER; note = 2'-fluoroadenosine
  modified_base 11: mod_base = OTHER; note = 2'-fluorocytidine
  modified_base 12: mod_base = um
  modified_base 13: mod_base = gm
  modified_base 14: mod_base = OTHER; note = 2'-O-methyladenosine
  modified_base 15: mod_base = OTHER; note = 2'-O-methyladenosine
  modified_base 16: mod_base = cm
  modified_base 17: mod_base = OTHER; note = 2'-O-methyladenosine
  modified_base 18: mod_base = cm
  modified_base 19: mod_base = OTHER; note = 2'-O-methyladenosine
  modified_base 20: mod_base = OTHER; note = 2 -O-methylinosine
  modified_base 21: mod_base = OTHER; note = 2'-O-methyladenosine
  source 1..21: mol_type = other RNA
ggaatggaaactgaacacana

SEQ ID NO: 699 - RNA, 21 nt, synthetic construct
  modified_base 1: mod_base = OTHER; note = 2'-O-methyladenosine
  modified_base 1^2: mod_base = OTHER; note = phosphorothioate linkage
  modified_base 2: mod_base = cm
  modified_base 3: mod_base = cm
  modified_base 4: mod_base = OTHER; note = 2'-O-methyladenosine
  modified_base 5: mod_base = gm
  modified_base 6: mod_base = OTHER; note = 2'-O-methyladenosine
  modified_base 7: mod_base = um
  modified_base 8: mod_base = um
  modified_base 9: mod_base = OTHER; note = 2'-fluorocytidine
  modified_base 10: mod_base = OTHER; note = 2'-fluorocytidine
  modified_base 11: mod_base = OTHER; note = 2'-fluorouridine
  modified_base 12: mod_base = gm
  modified_base 13: mod_base = gm
  modified_base 14: mod_base = gm
  modified_base 15: mod_base = OTHER; note = 2'-O-methyladenosine
  modified_base 16: mod_base = OTHER; note = 2'-O-methyladenosine
  modified_base 17: mod_base = OTHER; note = 2 -O-methylinosine
  modified_base 18: mod_base = cm
  modified_base 19: mod_base = cm
  modified_base 20: mod_base = OTHER; note = 2'-O-methyladenosine
  modified_base 21: mod_base = OTHER; note = 2'-O-methyladenosine
  source 1..21: mol_type = other RNA
accagattcctgggaanccaa

SEQ ID NO: 700 - RNA, 21 nt, synthetic construct
  modified_base 1: mod_base = um
  modified_base 1^2: mod_base = OTHER; note = phosphorothioate linkage
  modified_base 2: mod_base = cm
  modified_base 3: mod_base = cm
  modified_base 4: mod_base = um
  modified_base 5: mod_base = gm
  modified_base 6: mod_base = gm
  modified_base 7: mod_base = gm
  modified_base 8: mod_base = OTHER; note = 2'-O-methyladenosine
  modified_base 9: mod_base = OTHER; note = 2'-fluoroadenosine
  modified_base 10: mod_base = OTHER; note = 2'-fluoroguanosine
  modified_base 11: mod_base = OTHER; note = 2'-fluorocytidine
  modified_base 12: mod_base = cm
  modified_base 13: mod_base = OTHER; note = 2'-O-methyladenosine
  modified_base 14: mod_base = gm
  modified_base 15: mod_base = OTHER; note = 2'-O-methyladenosine
  modified_base 16: mod_base = OTHER; note = 2'-O-methyladenosine
  modified_base 17: mod_base = OTHER; note = 2'-O-methyladenosine
  modified_base 18: mod_base = um
  modified_base 19: mod_base = um
  modified_base 20: mod_base = gm
  modified_base 21: mod_base = um
  source 1..21: mol_type = other RNA
tcctgggaagccagaaattgt

SEQ ID NO: 701 - RNA, 21 nt, synthetic construct
  modified_base 1: mod_base = gm
  modified_base 1^2: mod_base = OTHER; note = phosphorothioate linkage
  modified_base 2: mod_base = cm
  modified_base 3: mod_base = cm
  modified_base 4: mod_base = OTHER; note = 2'-O-methyladenosine
  modified_base 5: mod_base = cm
  modified_base 6: mod_base = um
  modified_base 7: mod_base = gm
  modified_base 8: mod_base = gm
  modified_base 9: mod_base = OTHER; note = 2'-fluorouridine
  modified_base 10: mod_base = OTHER; note = 2'-fluoroguanosine
  modified_base 11: mod_base = OTHER; note = 2'-fluorocytidine
  modified_base 12: mod_base = um
  modified_base 13: mod_base = gm
  modified_base 14: mod_base = OTHER; note = 2'-O-methyladenosine
  modified_base 15: mod_base = OTHER; note = 2'-O-methyladenosine
  modified_base 16: mod_base = gm
  modified_base 17: mod_base = um
  modified_base 18: mod_base = gm
  modified_base 19: mod_base = um
  modified_base 20: mod_base = OTHER; note = 2'-O-methyladenosine
  modified_base 21: mod_base = OTHER; note = 2'-O-methyladenosine
  source 1..21: mol_type = other RNA
gccactggtgctgaagtgtaa

SEQ ID NO: 702 - RNA, 21 nt, synthetic construct
  modified_base 1: mod_base = cm
  modified_base 1^2: mod_base = OTHER; note = phosphorothioate linkage
  modified_base 2: mod_base = gm
  modified_base 3: mod_base = gm
  modified_base 4: mod_base = OTHER; note = 2'-O-methyladenosine
  modified_base 5: mod_base = cm
  modified_base 6: mod_base = OTHER; note = 2'-O-methyladenosine
  modified_base 7: mod_base = gm
  modified_base 8: mod_base = OTHER; note = 2'-O-methyladenosine
  modified_base 9: mod_base = OTHER; note = 2'-fluoroadenosine
  modified_base 10: mod_base = OTHER; note = 2'-fluoroguanosine
  modified_base 11: mod_base = OTHER; note = 2'-fluorocytidine
  modified_base 12: mod_base = um
  modified_base 13: mod_base = um
  modified_base 14: mod_base = gm
  modified_base 15: mod_base = gm
  modified_base 16: mod_base = OTHER; note = 2'-O-methyladenosine
  modified_base 17: mod_base = OTHER; note = 2'-O-methyladenosine
  modified_base 18: mod_base = gm
  modified_base 19: mod_base = OTHER; note = 2 -O-methylinosine
  modified_base 20: mod_base = um
  modified_base 21: mod_base = OTHER; note = 2'-O-methyladenosine
  source 1..21: mol_type = other RNA
cggacagaagcttggaagnta

SEQ ID NO: 703 - RNA, 21 nt, synthetic construct
  modified_base 1: mod_base = cm
  modified_base 1^2: mod_base = OTHER; note = phosphorothioate linkage
  modified_base 2: mod_base = OTHER; note = 2'-O-methyladenosine
  modified_base 3: mod_base = gm
  modified_base 4: mod_base = gm
  modified_base 5: mod_base = OTHER; note = 2'-O-methyladenosine
  modified_base 6: mod_base = um
  modified_base 7: mod_base = gm
  modified_base 8: mod_base = OTHER; note = 2'-O-methyladenosine
  modified_base 9: mod_base = OTHER; note = 2'-fluoroguanosine
  modified_base 10: mod_base = OTHER; note = 2'-fluoroguanosine
  modified_base 11: mod_base = OTHER; note = 2'-fluoroguanosine
  modified_base 12: mod_base = gm
  modified_base 13: mod_base = OTHER; note = 2'-O-methyladenosine
  modified_base 14: mod_base = um
  modified_base 15: mod_base = um
  modified_base 16: mod_base = um
  modified_base 17: mod_base = um
  modified_base 18: mod_base = cm
  modified_base 19: mod_base = cm
  modified_base 20: mod_base = OTHER; note = 2 -O-methylinosine
  modified_base 21: mod_base = OTHER; note = 2'-O-methyladenosine
  source 1..21: mol_type = other RNA
caggatgaggggattttccna

SEQ ID NO: 704 - RNA, 21 nt, synthetic construct
  modified_base 1: mod_base = OTHER; note = 2'-O-methyladenosine
  modified_base 1^2: mod_base = OTHER; note = phosphorothioate linkage
  modified_base 2: mod_base = gm
  modified_base 3: mod_base = OTHER; note = 2'-O-methyladenosine
  modified_base 4: mod_base = um
  modified_base 5: mod_base = um
  modified_base 6: mod_base = cm
  modified_base 7: mod_base = cm
  modified_base 8: mod_base = um
  modified_base 9: mod_base = OTHER; note = 2'-fluoroguanosine
  modified_base 10: mod_base = OTHER; note = 2'-fluoroguanosine
  modified_base 11: mod_base = OTHER; note = 2'-fluoroguanosine
  modified_base 12: mod_base = OTHER; note = 2'-O-methyladenosine
  modified_base 13: mod_base = OTHER; note = 2'-O-methyladenosine
  modified_base 14: mod_base = gm
  modified_base 15: mod_base = cm
  modified_base 16: mod_base = um
  modified_base 17: mod_base = OTHER; note = 2'-O-methyladenosine
  modified_base 18: mod_base = gm
  modified_base 19: mod_base = OTHER; note = 2'-O-methyladenosine
  modified_base 20: mod_base = OTHER; note = 2'-O-methyladenosine
  modified_base 21: mod_base = OTHER; note = 2'-O-methyladenosine
  source 1..21: mol_type = other RNA
agattcctgggaagctagaaa

SEQ ID NO: 705 - RNA, 21 nt, synthetic construct
  modified_base 1: mod_base = OTHER; note = 2 -O-methyl-2-aminoadenosine
  modified_base 1^2: mod_base = OTHER; note = phosphorothioate linkage
  modified_base 2: mod_base = gm
  modified_base 3: mod_base = OTHER; note = 2'-O-methyladenosine
  modified_base 4: mod_base = um
  modified_base 5: mod_base = um
  modified_base 6: mod_base = cm
  modified_base 7: mod_base = um
  modified_base 8: mod_base = gm
  modified_base 9: mod_base = OTHER; note = 2'-fluorocytidine
  modified_base 10: mod_base = OTHER; note = 2'-fluorocytidine
  modified_base 11: mod_base = OTHER; note = 2'-fluorouridine
  modified_base 12: mod_base = cm
  modified_base 13: mod_base = um
  modified_base 14: mod_base = gm
  modified_base 15: mod_base = OTHER; note = 2'-O-methyladenosine
  modified_base 16: mod_base = OTHER; note = 2'-O-methyladenosine
  modified_base 17: mod_base = cm
  modified_base 18: mod_base = um
  modified_base 19: mod_base = cm
  modified_base 20: mod_base = OTHER; note = 2'-O-methyladenosine
  modified_base 21: mod_base = OTHER; note = 2'-O-methyladenosine
  source 1..21: mol_type = other RNA
ngattctgcctctgaactcaa

SEQ ID NO: 706 - RNA, 21 nt, synthetic construct
  modified_base 1: mod_base = um
  modified_base 1^2: mod_base = OTHER; note = phosphorothioate linkage
  modified_base 2: mod_base = OTHER; note = 2'-O-methyladenosine
  modified_base 3: mod_base = cm
  modified_base 4: mod_base = cm
  modified_base 5: mod_base = cm
  modified_base 6: mod_base = um
  modified_base 7: mod_base = gm
  modified_base 8: mod_base = cm
  modified_base 9: mod_base = OTHER; note = 2'-fluoroadenosine
  modified_base 10: mod_base = OTHER; note = 2'-fluoroguanosine
  modified_base 11: mod_base = OTHER; note = 2'-fluoroguanosine
  modified_base 12: mod_base = gm
  modified_base 13: mod_base = OTHER; note = 2'-O-methyladenosine
  modified_base 14: mod_base = cm
  modified_base 15: mod_base = um
  modified_base 16: mod_base = cm
  modified_base 17: mod_base = um
  modified_base 18: mod_base = um
  modified_base 19: mod_base = OTHER; note = 2'-O-methyladenosine
  modified_base 20: mod_base = gm
  modified_base 21: mod_base = OTHER; note = 2'-O-methyladenosine
  source 1..21: mol_type = other RNA
taccctgcagggactcttaga

SEQ ID NO: 707 - RNA, 21 nt, synthetic construct
  modified_base 1: mod_base = OTHER; note = 2'-O-methyladenosine
  modified_base 1^2: mod_base = OTHER; note = phosphorothioate linkage
  modified_base 2: mod_base = cm
  modified_base 3: mod_base = cm
  modified_base 4: mod_base = cm
  modified_base 5: mod_base = um
  modified_base 6: mod_base = gm
  modified_base 7: mod_base = cm
  modified_base 8: mod_base = OTHER; note = 2'-O-methyladenosine
  modified_base 9: mod_base = OTHER; note = 2'-fluoroguanosine
  modified_base 10: mod_base = OTHER; note = 2'-fluoroguanosine
  modified_base 11: mod_base = OTHER; note = 2'-fluoroguanosine
  modified_base 12: mod_base = OTHER; note = 2'-O-methyladenosine
  modified_base 13: mod_base = cm
  modified_base 14: mod_base = um
  modified_base 15: mod_base = cm
  modified_base 16: mod_base = um
  modified_base 17: mod_base = um
  modified_base 18: mod_base = OTHER; note = 2'-O-methyladenosine
  modified_base 19: mod_base = OTHER; note = 2 -O-methylinosine
  modified_base 20: mod_base = cm
  modified_base 21: mod_base = um
  source 1..21: mol_type = other RNA
accctgcagggactcttanct

SEQ ID NO: 708 - RNA, 21 nt, synthetic construct
  modified_base 1: mod_base = um
  modified_base 1^2: mod_base = OTHER; note = phosphorothioate linkage
  modified_base 2: mod_base = cm
  modified_base 3: mod_base = cm
  modified_base 4: mod_base = cm
  modified_base 5: mod_base = OTHER; note = 2'-O-methyladenosine
  modified_base 6: mod_base = cm
  modified_base 7: mod_base = cm
  modified_base 8: mod_base = um
  modified_base 9: mod_base = OTHER; note = 2'-fluorouridine
  modified_base 10: mod_base = OTHER; note = 2'-fluorocytidine
  modified_base 11: mod_base = OTHER; note = 2'-fluorouridine
  modified_base 12: mod_base = cm
  modified_base 13: mod_base = cm
  modified_base 14: mod_base = um
  modified_base 15: mod_base = gm
  modified_base 16: mod_base = um
  modified_base 17: mod_base = OTHER; note = 2'-O-methyladenosine
  modified_base 18: mod_base = OTHER; note = 2 -O-methylinosine
  modified_base 19: mod_base = cm
  modified_base 20: mod_base = um
  modified_base 21: mod_base = um
  source 1..21: mol_type = other RNA
tcccaccttctcctgtanctt

SEQ ID NO: 709 - RNA, 21 nt, synthetic construct
  modified_base 1: mod_base = OTHER; note = 2'-O-methyladenosine
  modified_base 1^2: mod_base = OTHER; note = phosphorothioate linkage
  modified_base 2: mod_base = cm
  modified_base 3: mod_base = cm
  modified_base 4: mod_base = um
  modified_base 5: mod_base = um
  modified_base 6: mod_base = cm
  modified_base 7: mod_base = um
  modified_base 8: mod_base = cm
  modified_base 9: mod_base = OTHER; note = 2'-fluorocytidine
  modified_base 10: mod_base = OTHER; note = 2'-fluorouridine
  modified_base 11: mod_base = OTHER; note = 2'-fluoroguanosine
  modified_base 12: mod_base = um
  modified_base 13: mod_base = OTHER; note = 2'-O-methyladenosine
  modified_base 14: mod_base = gm
  modified_base 15: mod_base = cm
  modified_base 16: mod_base = um
  modified_base 17: mod_base = um
  modified_base 18: mod_base = cm
  modified_base 19: mod_base = OTHER; note = 2'-O-methyladenosine
  modified_base 20: mod_base = OTHER; note = 2 -O-methylinosine
  modified_base 21: mod_base = OTHER; note = 2'-O-methyladenosine
  source 1..21: mol_type = other RNA
accttctcctgtagcttcana

SEQ ID NO: 710 - RNA, 21 nt, synthetic construct
  modified_base 1: mod_base = gm
  modified_base 1^2: mod_base = OTHER; note = phosphorothioate linkage
  modified_base 2: mod_base = gm
  modified_base 3: mod_base = um
  modified_base 4: mod_base = gm
  modified_base 5: mod_base = cm
  modified_base 6: mod_base = um
  modified_base 7: mod_base = gm
  modified_base 8: mod_base = gm
  modified_base 9: mod_base = OTHER; note = 2'-fluorouridine
  modified_base 10: mod_base = OTHER; note = 2'-fluorocytidine
  modified_base 11: mod_base = OTHER; note = 2'-fluorocytidine
  modified_base 12: mod_base = um
  modified_base 13: mod_base = cm
  modified_base 14: mod_base = OTHER; note = 2'-O-methyladenosine
  modified_base 15: mod_base = gm
  modified_base 16: mod_base = um
  modified_base 17: mod_base = cm
  modified_base 18: mod_base = um
  modified_base 19: mod_base = OTHER; note = 2 -O-methylinosine
  modified_base 20: mod_base = um
  modified_base 21: mod_base = OTHER; note = 2'-O-methyladenosine
  source 1..21: mol_type = other RNA
ggtgctggtcctcagtctnta

SEQ ID NO: 711 - RNA, 21 nt, synthetic construct
  modified_base 1: mod_base = gm
  modified_base 1^2: mod_base = OTHER; note = phosphorothioate linkage
  modified_base 2: mod_base = gm
  modified_base 3: mod_base = um
  modified_base 4: mod_base = gm
  modified_base 5: mod_base = cm
  modified_base 6: mod_base = um
  modified_base 7: mod_base = gm
  modified_base 8: mod_base = gm
  modified_base 9: mod_base = OTHER; note = 2'-fluorouridine
  modified_base 10: mod_base = OTHER; note = 2'-fluorocytidine
  modified_base 11: mod_base = OTHER; note = 2'-fluorocytidine
  modified_base 12: mod_base = um
  modified_base 13: mod_base = cm
  modified_base 14: mod_base = OTHER; note = 2'-O-methyladenosine
  modified_base 15: mod_base = gm
  modified_base 16: mod_base = um
  modified_base 17: mod_base = cm
  modified_base 18: mod_base = um
  modified_base 19: mod_base = gm
  modified_base 20: mod_base = um
  modified_base 21: mod_base = OTHER; note = 2'-O-methyladenosine
  source 1..21: mol_type = other RNA
ggtgctggtcctcagtctgta

SEQ ID NO: 712 - RNA, 21 nt, synthetic construct
  modified_base 1: mod_base = gm
  modified_base 1^2: mod_base = OTHER; note = phosphorothioate linkage
  modified_base 2: mod_base = um
  modified_base 3: mod_base = gm
  modified_base 4: mod_base = cm
  modified_base 5: mod_base = um
  modified_base 6: mod_base = gm
  modified_base 7: mod_base = gm
  modified_base 8: mod_base = um
  modified_base 9: mod_base = OTHER; note = 2'-fluorocytidine
  modified_base 10: mod_base = OTHER; note = 2'-fluorocytidine
  modified_base 11: mod_base = OTHER; note = 2'-fluorouridine
  modified_base 12: mod_base = cm
  modified_base 13: mod_base = OTHER; note = 2'-O-methyladenosine
  modified_base 14: mod_base = gm
  modified_base 15: mod_base = um
  modified_base 16: mod_base = cm
  modified_base 17: mod_base = um
  modified_base 18: mod_base = gm
  modified_base 19: mod_base = um
  modified_base 20: mod_base = OTHER; note = 2 -O-methylinosine
  modified_base 21: mod_base = OTHER; note = 2'-O-methyladenosine
  source 1..21: mol_type = other RNA
gtgctggtcctcagtctgtna

SEQ ID NO: 713 - RNA, 21 nt, synthetic construct
  modified_base 1: mod_base = gm
  modified_base 1^2: mod_base = OTHER; note = phosphorothioate linkage
  modified_base 2: mod_base = um
  modified_base 3: mod_base = gm
  modified_base 4: mod_base = cm
  modified_base 5: mod_base = um
  modified_base 6: mod_base = gm
  modified_base 7: mod_base = gm
  modified_base 8: mod_base = um
  modified_base 9: mod_base = OTHER; note = 2'-fluorocytidine
  modified_base 10: mod_base = OTHER; note = 2'-fluorocytidine
  modified_base 11: mod_base = OTHER; note = 2'-fluorouridine
  modified_base 12: mod_base = cm
  modified_base 13: mod_base = OTHER; note = 2'-O-methyladenosine
  modified_base 14: mod_base = gm
  modified_base 15: mod_base = um
  modified_base 16: mod_base = cm
  modified_base 17: mod_base = um
  modified_base 18: mod_base = OTHER; note = 2 -O-methylinosine
  modified_base 19: mod_base = um
  modified_base 20: mod_base = gm
  modified_base 21: mod_base = OTHER; note = 2'-O-methyladenosine
  source 1..21: mol_type = other RNA
gtgctggtcctcagtctntga

SEQ ID NO: 714 - RNA, 21 nt, synthetic construct
  modified_base 1: mod_base = cm
  modified_base 1^2: mod_base = OTHER; note = phosphorothioate linkage
  modified_base 2: mod_base = gm
  modified_base 3: mod_base = gm
  modified_base 4: mod_base = OTHER; note = 2'-O-methyladenosine
  modified_base 5: mod_base = OTHER; note = 2'-O-methyladenosine
  modified_base 6: mod_base = um
  modified_base 7: mod_base = gm
  modified_base 8: mod_base = gm
  modified_base 9: mod_base = OTHER; note = 2'-fluoroadenosine
  modified_base 10: mod_base = OTHER; note = 2'-fluoroadenosine
  modified_base 11: mod_base = OTHER; note = 2'-fluoroadenosine
  modified_base 12: mod_base = cm
  modified_base 13: mod_base = um
  modified_base 14: mod_base = gm
  modified_base 15: mod_base = OTHER; note = 2'-O-methyladenosine
  modified_base 16: mod_base = OTHER; note = 2'-O-methyladenosine
  modified_base 17: mod_base = cm
  modified_base 18: mod_base = OTHER; note = 2'-O-methyladenosine
  modified_base 19: mod_base = cm
  modified_base 20: mod_base = OTHER; note = 2'-O-methyladenosine
  modified_base 21: mod_base = OTHER; note = 2'-O-methyladenosine
  source 1..21: mol_type = other RNA
cggaatggaaactgaacacaa

SEQ ID NO: 715 - RNA, 21 nt, synthetic construct
  modified_base 1: mod_base = gm
  modified_base 1^2: mod_base = OTHER; note = phosphorothioate linkage
  modified_base 2: mod_base = gm
  modified_base 3: mod_base = gm
  modified_base 4: mod_base = OTHER; note = 2'-O-methyladenosine
  modified_base 5: mod_base = OTHER; note = 2'-O-methyladenosine
  modified_base 6: mod_base = um
  modified_base 7: mod_base = gm
  modified_base 8: mod_base = gm
  modified_base 9: mod_base = OTHER; note = 2'-fluoroadenosine
  modified_base 10: mod_base = OTHER; note = 2'-fluoroadenosine
  modified_base 11: mod_base = OTHER; note = 2'-fluoroadenosine
  modified_base 12: mod_base = cm
  modified_base 13: mod_base = um
  modified_base 14: mod_base = gm
  modified_base 15: mod_base = OTHER; note = 2'-O-methyladenosine
  modified_base 16: mod_base = OTHER; note = 2'-O-methyladenosine
  modified_base 17: mod_base = cm
  modified_base 18: mod_base = OTHER; note = 2'-O-methyladenosine
  modified_base 19: mod_base = cm
  modified_base 20: mod_base = OTHER; note = 2'-O-methyladenosine
  modified_base 21: mod_base = OTHER; note = 2'-O-methyladenosine
  source 1..21: mol_type = other RNA
gggaatggaaactgaacacaa

SEQ ID NO: 716 - RNA, 21 nt, synthetic construct
  modified_base 1: mod_base = cm
  modified_base 1^2: mod_base = OTHER; note = phosphorothioate linkage
  modified_base 2: mod_base = gm
  modified_base 3: mod_base = gm
  modified_base 4: mod_base = OTHER; note = 2'-O-methyladenosine
  modified_base 5: mod_base = OTHER; note = 2'-O-methyladenosine
  modified_base 6: mod_base = um
  modified_base 7: mod_base = gm
  modified_base 8: mod_base = gm
  modified_base 9: mod_base = OTHER; note = 2'-fluoroadenosine
  modified_base 10: mod_base = OTHER; note = 2'-fluoroadenosine
  modified_base 11: mod_base = OTHER; note = 2'-fluoroadenosine
  modified_base 12: mod_base = cm
  modified_base 13: mod_base = um
  modified_base 14: mod_base = OTHER; note = 2 -O-methylinosine
  modified_base 15: mod_base = OTHER; note = 2'-O-methyladenosine
  modified_base 16: mod_base = OTHER; note = 2'-O-methyladenosine
  modified_base 17: mod_base = cm
  modified_base 18: mod_base = OTHER; note = 2'-O-methyladenosine
  modified_base 19: mod_base = cm
  modified_base 20: mod_base = OTHER; note = 2'-O-methyladenosine
  modified_base 21: mod_base = OTHER; note = 2'-O-methyladenosine
  source 1..21: mol_type = other RNA
cggaatggaaactnaacacaa

SEQ ID NO: 717 - RNA, 21 nt, synthetic construct
  modified_base 1: mod_base = cm
  modified_base 1^2: mod_base = OTHER; note = phosphorothioate linkage
  modified_base 2: mod_base = gm
  modified_base 3: mod_base = gm
  modified_base 4: mod_base = OTHER; note = 2'-O-methyladenosine
  modified_base 5: mod_base = OTHER; note = 2'-O-methyladenosine
  modified_base 6: mod_base = um
  modified_base 7: mod_base = gm
  modified_base 8: mod_base = gm
  modified_base 9: mod_base = OTHER; note = 2'-fluoroadenosine
  modified_base 10: mod_base = OTHER; note = 2 -O-methyl-2-aminoadenosine
  modified_base 11: mod_base = OTHER; note = 2'-fluoroadenosine
  modified_base 12: mod_base = cm
  modified_base 13: mod_base = um
  modified_base 14: mod_base = OTHER; note = 2 -O-methylinosine
  modified_base 15: mod_base = OTHER; note = 2'-O-methyladenosine
  modified_base 16: mod_base = OTHER; note = 2'-O-methyladenosine
  modified_base 17: mod_base = cm
  modified_base 18: mod_base = OTHER; note = 2'-O-methyladenosine
  modified_base 19: mod_base = cm
  modified_base 20: mod_base = OTHER; note = 2'-O-methyladenosine
  modified_base 21: mod_base = OTHER; note = 2'-O-methyladenosine
  source 1..21: mol_type = other RNA
cggaatgganactnaacacaa

SEQ ID NO: 718 - RNA, 21 nt, synthetic construct
  modified_base 1: mod_base = cm
  modified_base 1^2: mod_base = OTHER; note = phosphorothioate linkage
  modified_base 2: mod_base = gm
  modified_base 3: mod_base = gm
  modified_base 4: mod_base = OTHER; note = 2'-O-methyladenosine
  modified_base 5: mod_base = OTHER; note = 2'-O-methyladenosine
  modified_base 6: mod_base = um
  modified_base 7: mod_base = gm
  modified_base 8: mod_base = gm
  modified_base 9: mod_base = OTHER; note = 2'-fluoroadenosine
  modified_base 10: mod_base = OTHER; note = 2'-fluoroadenosine
  modified_base 11: mod_base = OTHER; note = 2'-fluoroadenosine
  modified_base 12: mod_base = cm
  modified_base 13: mod_base = um
  modified_base 14: mod_base = gm
  modified_base 15: mod_base = OTHER; note = 2'-O-methyladenosine
  modified_base 16: mod_base = OTHER; note = 2'-O-methyladenosine
  modified_base 17: mod_base = um
  modified_base 18: mod_base = OTHER; note = 2'-O-methyladenosine
  modified_base 19: mod_base = cm
  modified_base 20: mod_base = OTHER; note = 2'-O-methyladenosine
  modified_base 21: mod_base = OTHER; note = 2'-O-methyladenosine
  source 1..21: mol_type = other RNA
cggaatggaaactgaatacaa

SEQ ID NO: 719 - RNA, 21 nt, synthetic construct
  modified_base 1: mod_base = cm
  modified_base 1^2: mod_base = OTHER; note = phosphorothioate linkage
  modified_base 2: mod_base = gm
  modified_base 3: mod_base = gm
  modified_base 4: mod_base = OTHER; note = 2'-O-methyladenosine
  modified_base 5: mod_base = OTHER; note = 2'-O-methyladenosine
  modified_base 6: mod_base = um
  modified_base 7: mod_base = OTHER; note = 2'-fluoroguanosine
  modified_base 8: mod_base = gm
  modified_base 9: mod_base = OTHER; note = 2'-fluoroadenosine
  modified_base 10: mod_base = OTHER; note = 2'-O-methyladenosine
  modified_base 11: mod_base = OTHER; note = 2'-fluoroadenosine
  modified_base 12: mod_base = cm
  modified_base 13: mod_base = um
  modified_base 14: mod_base = gm
  modified_base 15: mod_base = OTHER; note = 2'-O-methyladenosine
  modified_base 16: mod_base = OTHER; note = 2'-O-methyladenosine
  modified_base 17: mod_base = cm
  modified_base 18: mod_base = OTHER; note = 2'-O-methyladenosine
  modified_base 19: mod_base = cm
  modified_base 20: mod_base = OTHER; note = 2'-O-methyladenosine
  modified_base 21: mod_base = OTHER; note = 2'-O-methyladenosine
  source 1..21: mol_type = other RNA
cggaatggaaactgaacacaa

SEQ ID NO: 720 - RNA, 21 nt, synthetic construct
  modified_base 1: mod_base = um
  modified_base 1^2: mod_base = OTHER; note = phosphorothioate linkage
  modified_base 2: mod_base = cm
  modified_base 3: mod_base = cm
  modified_base 4: mod_base = um
  modified_base 5: mod_base = gm
  modified_base 6: mod_base = gm
  modified_base 7: mod_base = gm
  modified_base 8: mod_base = OTHER; note = 2'-O-methyladenosine
  modified_base 9: mod_base = OTHER; note = 2'-fluoroadenosine
  modified_base 10: mod_base = OTHER; note = 2'-fluoroguanosine
  modified_base 11: mod_base = OTHER; note = 2'-fluorocytidine
  modified_base 12: mod_base = cm
  modified_base 13: mod_base = OTHER; note = 2'-O-methyladenosine
  modified_base 14: mod_base = gm
  modified_base 15: mod_base = OTHER; note = 2'-O-methyladenosine
  modified_base 16: mod_base = OTHER; note = 2'-O-methyladenosine
  modified_base 17: mod_base = OTHER; note = 2'-O-methyladenosine
  modified_base 18: mod_base = um
  modified_base 19: mod_base = um
  modified_base 20: mod_base = gm
  modified_base 21: mod_base = um
  source 1..21: mol_type = other RNA
tcctgggaagccagaaattgt

SEQ ID NO: 721 - RNA, 21 nt, synthetic construct
  modified_base 1: mod_base = gm
  modified_base 1^2: mod_base = OTHER; note = phosphorothioate linkage
  modified_base 2: mod_base = OTHER; note = 2'-O-methyladenosine
  modified_base 3: mod_base = gm
  modified_base 4: mod_base = um
  modified_base 5: mod_base = OTHER; note = 2'-O-methyladenosine
  modified_base 6: mod_base = gm
  modified_base 7: mod_base = gm
  modified_base 8: mod_base = um
  modified_base 9: mod_base = OTHER; note = 2'-fluoroguanosine
  modified_base 10: mod_base = OTHER; note = 2'-fluorocytidine
  modified_base 11: mod_base = OTHER; note = 2'-fluorouridine
  modified_base 12: mod_base = cm
  modified_base 13: mod_base = OTHER; note = 2'-O-methyladenosine
  modified_base 14: mod_base = OTHER; note = 2'-O-methyladenosine
  modified_base 15: mod_base = OTHER; note = 2'-O-methyladenosine
  modified_base 16: mod_base = OTHER; note = 2'-O-methyladenosine
  modified_base 17: mod_base = cm
  modified_base 18: mod_base = OTHER; note = 2'-O-methyladenosine
  modified_base 19: mod_base = um
  modified_base 20: mod_base = cm
  modified_base 21: mod_base = OTHER; note = 2'-O-methyladenosine
  source 1..21: mol_type = other RNA
gagtaggtgctcaaaacatca

SEQ ID NO: 722 - RNA, 21 nt, synthetic construct
  modified_base 1: mod_base = OTHER; note = 2'-O-methyladenosine
  modified_base 1^2: mod_base = OTHER; note = phosphorothioate linkage
  modified_base 2: mod_base = gm
  modified_base 3: mod_base = gm
  modified_base 4: mod_base = cm
  modified_base 5: mod_base = OTHER; note = 2'-O-methyladenosine
  modified_base 6: mod_base = OTHER; note = 2'-O-methyladenosine
  modified_base 7: mod_base = um
  modified_base 8: mod_base = gm
  modified_base 9: mod_base = OTHER; note = 2'-fluoroadenosine
  modified_base 10: mod_base = OTHER; note = 2'-fluoroadenosine
  modified_base 11: mod_base = OTHER; note = 2'-fluorocytidine
  modified_base 12: mod_base = OTHER; note = 2'-O-methyladenosine
  modified_base 13: mod_base = gm
  modified_base 14: mod_base = gm
  modified_base 15: mod_base = OTHER; note = 2'-O-methyladenosine
  modified_base 16: mod_base = OTHER; note = 2'-O-methyladenosine
  modified_base 17: mod_base = um
  modified_base 18: mod_base = OTHER; note = 2 -O-methylinosine
  modified_base 19: mod_base = gm
  modified_base 20: mod_base = OTHER; note = 2'-O-methyladenosine
  modified_base 21: mod_base = OTHER; note = 2'-O-methyladenosine
  source 1..21: mol_type = other RNA
aggcaatgaacaggaatngaa

SEQ ID NO: 723 - RNA, 21 nt, synthetic construct
  modified_base 1: mod_base = OTHER; note = 2'-O-methyladenosine
  modified_base 1^2: mod_base = OTHER; note = phosphorothioate linkage
  modified_base 2: mod_base = gm
  modified_base 3: mod_base = um
  modified_base 4: mod_base = cm
  modified_base 5: mod_base = cm
  modified_base 6: mod_base = gm
  modified_base 7: mod_base = um
  modified_base 8: mod_base = gm
  modified_base 9: mod_base = OTHER; note = 2'-fluorouridine
  modified_base 10: mod_base = OTHER; note = 2'-fluorocytidine
  modified_base 11: mod_base = OTHER; note = 2'-fluorouridine
  modified_base 12: mod_base = OTHER; note = 2'-O-methyladenosine
  modified_base 13: mod_base = cm
  modified_base 14: mod_base = cm
  modified_base 15: mod_base = OTHER; note = 2'-O-methyladenosine
  modified_base 16: mod_base = OTHER; note = 2 -O-methylinosine
  modified_base 17: mod_base = OTHER; note = 2'-O-methyladenosine
  modified_base 18: mod_base = um
  modified_base 19: mod_base = um
  modified_base 20: mod_base = cm
  modified_base 21: mod_base = OTHER; note = 2'-O-methyladenosine
  source 1..21: mol_type = other RNA
agtccgtgtctaccanattca

SEQ ID NO: 724 - RNA, 21 nt, synthetic construct
  modified_base 1: mod_base = um
  modified_base 1^2: mod_base = OTHER; note = phosphorothioate linkage
  modified_base 2: mod_base = cm
  modified_base 3: mod_base = cm
  modified_base 4: mod_base = gm
  modified_base 5: mod_base = um
  modified_base 6: mod_base = gm
  modified_base 7: mod_base = um
  modified_base 8: mod_base = cm
  modified_base 9: mod_base = OTHER; note = 2'-fluorouridine
  modified_base 10: mod_base = OTHER; note = 2'-fluoroadenosine
  modified_base 11: mod_base = OTHER; note = 2'-fluorocytidine
  modified_base 12: mod_base = cm
  modified_base 13: mod_base = OTHER; note = 2'-O-methyladenosine
  modified_base 14: mod_base = gm
  modified_base 15: mod_base = OTHER; note = 2'-O-methyladenosine
  modified_base 16: mod_base = um
  modified_base 17: mod_base = um
  modified_base 18: mod_base = cm
  modified_base 19: mod_base = cm
  modified_base 20: mod_base = um
  modified_base 21: mod_base = OTHER; note = 2'-O-methyladenosine
  source 1..21: mol_type = other RNA
tccgtgtctaccagattccta

SEQ ID NO: 725 - RNA, 21 nt, synthetic construct
  modified_base 1: mod_base = cm
  modified_base 1^2: mod_base = OTHER; note = phosphorothioate linkage
  modified_base 2: mod_base = cm
  modified_base 3: mod_base = cm
  modified_base 4: mod_base = OTHER; note = 2'-O-methyladenosine
  modified_base 5: mod_base = cm
  modified_base 6: mod_base = cm
  modified_base 7: mod_base = um
  modified_base 8: mod_base = um
  modified_base 9: mod_base = OTHER; note = 2'-fluorocytidine
  modified_base 10: mod_base = OTHER; note = 2'-fluorouridine
  modified_base 11: mod_base = OTHER; note = 2'-fluorocytidine
  modified_base 12: mod_base = cm
  modified_base 13: mod_base = um
  modified_base 14: mod_base = gm
  modified_base 15: mod_base = um
  modified_base 16: mod_base = OTHER; note = 2'-O-methyladenosine
  modified_base 17: mod_base = OTHER; note = 2 -O-methylinosine
  modified_base 18: mod_base = cm
  modified_base 19: mod_base = um
  modified_base 20: mod_base = um
  modified_base 21: mod_base = OTHER; note = 2'-O-methyladenosine
  source 1..21: mol_type = other RNA
cccaccttctcctgtanctta

SEQ ID NO: 726 - RNA, 21 nt, synthetic construct
  modified_base 1: mod_base = cm
  modified_base 1^2: mod_base = OTHER; note = phosphorothioate linkage
  modified_base 2: mod_base = um
  modified_base 3: mod_base = cm
  modified_base 4: mod_base = cm
  modified_base 5: mod_base = um
  modified_base 6: mod_base = cm
  modified_base 7: mod_base = OTHER; note = 2'-O-methyladenosine
  modified_base 8: mod_base = OTHER; note = 2'-O-methyladenosine
  modified_base 9: mod_base = OTHER; note = 2'-fluoroadenosine
  modified_base 10: mod_base = OTHER; note = 2'-fluorouridine
  modified_base 11: mod_base = OTHER; note = 2'-fluorocytidine
  modified_base 12: mod_base = cm
  modified_base 13: mod_base = OTHER; note = 2'-O-methyladenosine
  modified_base 14: mod_base = cm
  modified_base 15: mod_base = um
  modified_base 16: mod_base = OTHER; note = 2 -O-methylinosine
  modified_base 17: mod_base = gm
  modified_base 18: mod_base = OTHER; note = 2'-O-methyladenosine
  modified_base 19: mod_base = um
  modified_base 20: mod_base = gm
  modified_base 21: mod_base = OTHER; note = 2'-O-methyladenosine
  source 1..21: mol_type = other RNA
ctcctcaaatccactngatga

SEQ ID NO: 727 - RNA, 21 nt, synthetic construct
  modified_base 1: mod_base = gm
  modified_base 1^2: mod_base = OTHER; note = phosphorothioate linkage
  modified_base 2: mod_base = gm
  modified_base 3: mod_base = um
  modified_base 4: mod_base = OTHER; note = 2'-O-methyladenosine
  modified_base 5: mod_base = gm
  modified_base 6: mod_base = OTHER; note = 2'-O-methyladenosine
  modified_base 7: mod_base = um
  modified_base 8: mod_base = um
  modified_base 9: mod_base = OTHER; note = 2'-fluorocytidine
  modified_base 10: mod_base = OTHER; note = 2'-fluorouridine
  modified_base 11: mod_base = OTHER; note = 2'-fluoroguanosine
  modified_base 12: mod_base = cm
  modified_base 13: mod_base = cm
  modified_base 14: mod_base = um
  modified_base 15: mod_base = cm
  modified_base 16: mod_base = um
  modified_base 17: mod_base = OTHER; note = 2 -O-methylinosine
  modified_base 18: mod_base = OTHER; note = 2'-O-methyladenosine
  modified_base 19: mod_base = OTHER; note = 2'-O-methyladenosine
  modified_base 20: mod_base = cm
  modified_base 21: mod_base = um
  source 1..21: mol_type = other RNA
ggtagattctgcctctnaact

SEQ ID NO: 728 - RNA, 21 nt, synthetic construct
  modified_base 1: mod_base = um
  modified_base 1^2: mod_base = OTHER; note = phosphorothioate linkage
  modified_base 2: mod_base = OTHER; note = 2'-O-methyladenosine
  modified_base 3: mod_base = gm
  modified_base 4: mod_base = OTHER; note = 2'-O-methyladenosine
  modified_base 5: mod_base = um
  modified_base 6: mod_base = um
  modified_base 7: mod_base = cm
  modified_base 8: mod_base = um
  modified_base 9: mod_base = OTHER; note = 2'-fluoroguanosine
  modified_base 10: mod_base = OTHER; note = 2'-fluorocytidine
  modified_base 11: mod_base = OTHER; note = 2'-fluorocytidine
  modified_base 12: mod_base = um
  modified_base 13: mod_base = cm
  modified_base 14: mod_base = um
  modified_base 15: mod_base = gm
  modified_base 16: mod_base = OTHER; note = 2'-O-methyladenosine
  modified_base 17: mod_base = OTHER; note = 2'-O-methyladenosine
  modified_base 18: mod_base = cm
  modified_base 19: mod_base = um
  modified_base 20: mod_base = cm
  modified_base 21: mod_base = OTHER; note = 2'-O-methyladenosine
  source 1..21: mol_type = other RNA
tagattctgcctctgaactca

SEQ ID NO: 729 - RNA, 21 nt, synthetic construct
  modified_base 1: mod_base = gm
  modified_base 1^2: mod_base = OTHER; note = phosphorothioate linkage
  modified_base 2: mod_base = gm
  modified_base 3: mod_base = cm
  modified_base 4: mod_base = um
  modified_base 5: mod_base = gm
  modified_base 6: mod_base = gm
  modified_base 7: mod_base = um
  modified_base 8: mod_base = gm
  modified_base 9: mod_base = OTHER; note = 2'-fluorouridine
  modified_base 10: mod_base = OTHER; note = 2'-fluorouridine
  modified_base 11: mod_base = OTHER; note = 2'-fluorocytidine
  modified_base 12: mod_base = cm
  modified_base 13: mod_base = cm
  modified_base 14: mod_base = OTHER; note = 2'-O-methyladenosine
  modified_base 15: mod_base = OTHER; note = 2'-O-methyladenosine
  modified_base 16: mod_base = um
  modified_base 17: mod_base = OTHER; note = 2'-O-methyladenosine
  modified_base 18: mod_base = OTHER; note = 2'-O-methyladenosine
  modified_base 19: mod_base = gm
  modified_base 20: mod_base = gm
  modified_base 21: mod_base = um
  source 1..21: mol_type = other RNA
ggctggtgttcccaataaggt

SEQ ID NO: 730 - RNA, 21 nt, synthetic construct
  modified_base 1: mod_base = cm
  modified_base 1^2: mod_base = OTHER; note = phosphorothioate linkage
  modified_base 2: mod_base = um
  modified_base 3: mod_base = gm
  modified_base 4: mod_base = gm
  modified_base 5: mod_base = um
  modified_base 6: mod_base = gm
  modified_base 7: mod_base = um
  modified_base 8: mod_base = um
  modified_base 9: mod_base = OTHER; note = 2'-fluorocytidine
  modified_base 10: mod_base = OTHER; note = 2'-fluorocytidine
  modified_base 11: mod_base = OTHER; note = 2'-fluorocytidine
  modified_base 12: mod_base = OTHER; note = 2'-O-methyladenosine
  modified_base 13: mod_base = OTHER; note = 2'-O-methyladenosine
  modified_base 14: mod_base = um
  modified_base 15: mod_base = OTHER; note = 2'-O-methyladenosine
  modified_base 16: mod_base = OTHER; note = 2'-O-methyladenosine
  modified_base 17: mod_base = gm
  modified_base 18: mod_base = OTHER; note = 2 -O-methylinosine
  modified_base 19: mod_base = um
  modified_base 20: mod_base = gm
  modified_base 21: mod_base = OTHER; note = 2'-O-methyladenosine
  source 1..21: mol_type = other RNA
ctggtgttcccaataagntga

SEQ ID NO: 731 - RNA, 21 nt, synthetic construct
  modified_base 1: mod_base = gm
  modified_base 1^2: mod_base = OTHER; note = phosphorothioate linkage
  modified_base 2: mod_base = cm
  modified_base 3: mod_base = um
  modified_base 4: mod_base = um
  modified_base 5: mod_base = OTHER; note = 2'-O-methyladenosine
  modified_base 6: mod_base = gm
  modified_base 7: mod_base = cm
  modified_base 8: mod_base = um
  modified_base 9: mod_base = OTHER; note = 2'-fluoroguanosine
  modified_base 10: mod_base = OTHER; note = 2'-fluoroguanosine
  modified_base 11: mod_base = OTHER; note = 2'-fluorocytidine
  modified_base 12: mod_base = OTHER; note = 2'-O-methyladenosine
  modified_base 13: mod_base = cm
  modified_base 14: mod_base = um
  modified_base 15: mod_base = um
  modified_base 16: mod_base = OTHER; note = 2 -O-methylinosine
  modified_base 17: mod_base = gm
  modified_base 18: mod_base = OTHER; note = 2'-O-methyladenosine
  modified_base 19: mod_base = um
  modified_base 20: mod_base = gm
  modified_base 21: mod_base = OTHER; note = 2'-O-methyladenosine
  source 1..21: mol_type = other RNA
gcttagctggcacttngatga

SEQ ID NO: 732 - RNA, 21 nt, synthetic construct
  modified_base 1: mod_base = cm
  modified_base 1^2: mod_base = OTHER; note = phosphorothioate linkage
  modified_base 2: mod_base = cm
  modified_base 3: mod_base = um
  modified_base 4: mod_base = OTHER; note = 2'-O-methyladenosine
  modified_base 5: mod_base = OTHER; note = 2'-O-methyladenosine
  modified_base 6: mod_base = um
  modified_base 7: mod_base = gm
  modified_base 8: mod_base = OTHER; note = 2'-O-methyladenosine
  modified_base 9: mod_base = OTHER; note = 2'-fluoroguanosine
  modified_base 10: mod_base = OTHER; note = 2'-fluoroadenosine
  modified_base 11: mod_base = OTHER; note = 2'-fluoroadenosine
  modified_base 12: mod_base = gm
  modified_base 13: mod_base = gm
  modified_base 14: mod_base = gm
  modified_base 15: mod_base = OTHER; note = 2'-O-methyladenosine
  modified_base 16: mod_base = OTHER; note = 2 -O-methylinosine
  modified_base 17: mod_base = um
  modified_base 18: mod_base = OTHER; note = 2'-O-methyladenosine
  modified_base 19: mod_base = um
  modified_base 20: mod_base = cm
  modified_base 21: mod_base = um
  source 1..21: mol_type = other RNA
cctaatgagaagggantatct

SEQ ID NO: 733 - RNA, 21 nt, synthetic construct
  modified_base 1: mod_base = gm
  modified_base 1^2: mod_base = OTHER; note = phosphorothioate linkage
  modified_base 2: mod_base = um
  modified_base 3: mod_base = gm
  modified_base 4: mod_base = OTHER; note = 2'-O-methyladenosine
  modified_base 5: mod_base = gm
  modified_base 6: mod_base = OTHER; note = 2'-O-methyladenosine
  modified_base 7: mod_base = OTHER; note = 2'-O-methyladenosine
  modified_base 8: mod_base = gm
  modified_base 9: mod_base = OTHER; note = 2'-fluoroguanosine
  modified_base 10: mod_base = OTHER; note = 2'-fluoroguanosine
  modified_base 11: mod_base = OTHER; note = 2'-fluoroadenosine
  modified_base 12: mod_base = gm
  modified_base 13: mod_base = um
  modified_base 14: mod_base = OTHER; note = 2'-O-methyladenosine
  modified_base 15: mod_base = um
  modified_base 16: mod_base = cm
  modified_base 17: mod_base = um
  modified_base 18: mod_base = OTHER; note = 2 -O-methylinosine
  modified_base 19: mod_base = um
  modified_base 20: mod_base = gm
  modified_base 21: mod_base = OTHER; note = 2'-O-methyladenosine
  source 1..21: mol_type = other RNA
gtgagaagggagtatctntga

SEQ ID NO: 734 - RNA, 21 nt, synthetic construct
  modified_base 1: mod_base = cm
  modified_base 1^2: mod_base = OTHER; note = phosphorothioate linkage
  modified_base 2: mod_base = OTHER; note = 2'-O-methyladenosine
  modified_base 3: mod_base = gm
  modified_base 4: mod_base = cm
  modified_base 5: mod_base = OTHER; note = 2'-O-methyladenosine
  modified_base 6: mod_base = um
  modified_base 7: mod_base = cm
  modified_base 8: mod_base = OTHER; note = 2'-O-methyladenosine
  modified_base 9: mod_base = OTHER; note = 2'-fluoroguanosine
  modified_base 10: mod_base = OTHER; note = 2'-fluorocytidine
  modified_base 11: mod_base = OTHER; note = 2'-fluoroadenosine
  modified_base 12: mod_base = um
  modified_base 13: mod_base = cm
  modified_base 14: mod_base = OTHER; note = 2'-O-methyladenosine
  modified_base 15: mod_base = um
  modified_base 16: mod_base = cm
  modified_base 17: mod_base = OTHER; note = 2 -O-methylinosine
  modified_base 18: mod_base = OTHER; note = 2'-O-methyladenosine
  modified_base 19: mod_base = OTHER; note = 2'-O-methyladenosine
  modified_base 20: mod_base = cm
  modified_base 21: mod_base = OTHER; note = 2'-O-methyladenosine
  source 1..21: mol_type = other RNA
cagcatcagcatcatcnaaca

SEQ ID NO: 735 - RNA, 21 nt, synthetic construct
  modified_base 1: mod_base = cm
  modified_base 2: mod_base = gm
  modified_base 3: mod_base = gm
  modified_base 4: mod_base = OTHER; note = 2'-O-methyladenosine
  modified_base 5: mod_base = OTHER; note = 2'-O-methyladenosine
  modified_base 6: mod_base = um
  modified_base 7: mod_base = gm
  modified_base 8: mod_base = gm
  modified_base 9: mod_base = OTHER; note = 2'-fluoroadenosine
  modified_base 10: mod_base = OTHER; note = 2'-fluoroadenosine
  modified_base 11: mod_base = OTHER; note = 2'-fluoroadenosine
  modified_base 12: mod_base = cm
  modified_base 13: mod_base = um
  modified_base 14: mod_base = gm
  modified_base 15: mod_base = OTHER; note = 2'-O-methyladenosine
  modified_base 16: mod_base = OTHER; note = 2'-O-methyladenosine
  modified_base 17: mod_base = cm
  modified_base 18: mod_base = OTHER; note = 2'-O-methyladenosine
  modified_base 19: mod_base = cm
  modified_base 20: mod_base = OTHER; note = 2'-O-methyladenosine
  modified_base 21: mod_base = OTHER; note = 2'-O-methyladenosine
  source 1..21: mol_type = other RNA
cggaatggaaactgaacacaa

SEQ ID NO: 736 - RNA, 21 nt, synthetic construct
  modified_base 1: mod_base = cm
  modified_base 1^2: mod_base = OTHER; note = phosphorothioate linkage
  modified_base 2: mod_base = gm
  modified_base 3: mod_base = gm
  modified_base 4: mod_base = OTHER; note = 2'-O-methyladenosine
  modified_base 5: mod_base = OTHER; note = 2'-O-methyladenosine
  modified_base 6: mod_base = um
  modified_base 7: mod_base = gm
  modified_base 8: mod_base = gm
  modified_base 9: mod_base = OTHER; note = 2'-fluoroadenosine
  modified_base 10: mod_base = OTHER; note = 2'-fluoroadenosine
  modified_base 11: mod_base = OTHER; note = 2'-fluoroadenosine
  modified_base 12: mod_base = cm
  modified_base 13: mod_base = um
  modified_base 14: mod_base = gm
  modified_base 15: mod_base = OTHER; note = 2'-O-methyladenosine
  modified_base 16: mod_base = OTHER; note = 2'-O-methyladenosine
  modified_base 17: mod_base = cm
  modified_base 18: mod_base = OTHER; note = 2'-O-methyladenosine
  modified_base 19: mod_base = cm
  modified_base 20: mod_base = OTHER; note = 2'-O-methyladenosine
  modified_base 21: mod_base = OTHER; note = 2'-O-methyladenosine
  source 1..21: mol_type = other RNA
cggaatggaaactgaacacaa

SEQ ID NO: 737 - RNA, 21 nt, synthetic construct
  modified_base 1: mod_base = cm
  modified_base 2: mod_base = gm
  modified_base 3: mod_base = gm
  modified_base 4: mod_base = OTHER; note = 2'-O-methyladenosine
  modified_base 5: mod_base = OTHER; note = 2'-O-methyladenosine
  modified_base 6: mod_base = um
  modified_base 7: mod_base = gm
  modified_base 8: mod_base = gm
  modified_base 9: mod_base = OTHER; note = 2'-fluoroadenosine
  modified_base 10: mod_base = OTHER; note = 2'-fluoroadenosine
  modified_base 11: mod_base = OTHER; note = 2'-fluoroadenosine
  modified_base 12: mod_base = cm
  modified_base 13: mod_base = um
  modified_base 14: mod_base = gm
  modified_base 15: mod_base = OTHER; note = 2'-O-methyladenosine
  modified_base 16: mod_base = OTHER; note = 2'-O-methyladenosine
  modified_base 17: mod_base = cm
  modified_base 18: mod_base = OTHER; note = 2'-O-methyladenosine
  modified_base 19: mod_base = cm
  modified_base 20: mod_base = OTHER; note = 2'-O-methyladenosine
  modified_base 21: mod_base = OTHER; note = 2'-O-methyladenosine
  source 1..21: mol_type = other RNA
cggaatggaaactgaacacaa

SEQ ID NO: 738 - RNA, 21 nt, synthetic construct
  modified_base 1: mod_base = cm
  modified_base 1^2: mod_base = OTHER; note = phosphorothioate linkage
  modified_base 2: mod_base = gm
  modified_base 3: mod_base = gm
  modified_base 4: mod_base = OTHER; note = 2'-O-methyladenosine
  modified_base 5: mod_base = OTHER; note = 2'-O-methyladenosine
  modified_base 6: mod_base = um
  modified_base 7: mod_base = OTHER; note = 2'-fluoroguanosine
  modified_base 8: mod_base = gm
  modified_base 9: mod_base = OTHER; note = 2'-fluoroadenosine
  modified_base 10: mod_base = OTHER; note = 2'-O-methyladenosine
  modified_base 11: mod_base = OTHER; note = 2'-fluoroadenosine
  modified_base 12: mod_base = cm
  modified_base 13: mod_base = um
  modified_base 14: mod_base = gm
  modified_base 15: mod_base = OTHER; note = 2'-O-methyladenosine
  modified_base 16: mod_base = OTHER; note = 2'-O-methyladenosine
  modified_base 17: mod_base = um
  modified_base 18: mod_base = OTHER; note = 2'-O-methyladenosine
  modified_base 19: mod_base = cm
  modified_base 20: mod_base = OTHER; note = 2'-O-methyladenosine
  modified_base 21: mod_base = OTHER; note = 2'-O-methyladenosine
  source 1..21: mol_type = other RNA
cggaatggaaactgaatacaa

SEQ ID NO: 739 - RNA, 21 nt, synthetic construct
  modified_base 1: mod_base = gm
  modified_base 1^2: mod_base = OTHER; note = phosphorothioate linkage
  modified_base 2: mod_base = gm
  modified_base 3: mod_base = gm
  modified_base 4: mod_base = OTHER; note = 2'-O-methyladenosine
  modified_base 5: mod_base = OTHER; note = 2'-O-methyladenosine
  modified_base 6: mod_base = um
  modified_base 7: mod_base = OTHER; note = 2'-fluoroguanosine
  modified_base 8: mod_base = gm
  modified_base 9: mod_base = OTHER; note = 2'-fluoroadenosine
  modified_base 10: mod_base = OTHER; note = 2'-O-methyladenosine
  modified_base 11: mod_base = OTHER; note = 2'-fluoroadenosine
  modified_base 12: mod_base = cm
  modified_base 13: mod_base = um
  modified_base 14: mod_base = gm
  modified_base 15: mod_base = OTHER; note = 2'-O-methyladenosine
  modified_base 16: mod_base = OTHER; note = 2'-O-methyladenosine
  modified_base 17: mod_base = cm
  modified_base 18: mod_base = OTHER; note = 2'-O-methyladenosine
  modified_base 19: mod_base = cm
  modified_base 20: mod_base = OTHER; note = 2'-O-methyladenosine
  modified_base 21: mod_base = OTHER; note = 2'-O-methyladenosine
  source 1..21: mol_type = other RNA
gggaatggaaactgaacacaa

SEQ ID NO: 740 - RNA, 21 nt, synthetic construct
  modified_base 1: mod_base = um
  modified_base 1^2: mod_base = OTHER; note = phosphorothioate linkage
  modified_base 2: mod_base = gm
  modified_base 3: mod_base = gm
  modified_base 4: mod_base = OTHER; note = 2'-O-methyladenosine
  modified_base 5: mod_base = OTHER; note = 2'-O-methyladenosine
  modified_base 6: mod_base = um
  modified_base 7: mod_base = OTHER; note = 2'-fluoroguanosine
  modified_base 8: mod_base = gm
  modified_base 9: mod_base = OTHER; note = 2'-fluoroadenosine
  modified_base 10: mod_base = OTHER; note = 2'-O-methyladenosine
  modified_base 11: mod_base = OTHER; note = 2'-fluoroadenosine
  modified_base 12: mod_base = cm
  modified_base 13: mod_base = um
  modified_base 14: mod_base = gm
  modified_base 15: mod_base = OTHER; note = 2'-O-methyladenosine
  modified_base 16: mod_base = OTHER; note = 2'-O-methyladenosine
  modified_base 17: mod_base = cm
  modified_base 18: mod_base = OTHER; note = 2'-O-methyladenosine
  modified_base 19: mod_base = cm
  modified_base 20: mod_base = OTHER; note = 2'-O-methyladenosine
  modified_base 21: mod_base = OTHER; note = 2'-O-methyladenosine
  source 1..21: mol_type = other RNA
tggaatggaaactgaacacaa

SEQ ID NO: 741 - RNA, 21 nt, synthetic construct
  modified_base 1: mod_base = cm
  modified_base 1^2: mod_base = OTHER; note = phosphorothioate linkage
  modified_base 2: mod_base = gm
  modified_base 3: mod_base = gm
  modified_base 4: mod_base = OTHER; note = 2'-O-methyladenosine
  modified_base 5: mod_base = OTHER; note = 2'-O-methyladenosine
  modified_base 6: mod_base = um
  modified_base 7: mod_base = OTHER; note = 2'-fluoroguanosine
  modified_base 8: mod_base = gm
  modified_base 9: mod_base = OTHER; note = 2'-fluoroadenosine
  modified_base 10: mod_base = OTHER; note = 2 -O-methyl-2-aminoadenosine
  modified_base 11: mod_base = OTHER; note = 2'-fluoroadenosine
  modified_base 12: mod_base = cm
  modified_base 13: mod_base = um
  modified_base 14: mod_base = gm
  modified_base 15: mod_base = OTHER; note = 2'-O-methyladenosine
  modified_base 16: mod_base = OTHER; note = 2'-O-methyladenosine
  modified_base 17: mod_base = cm
  modified_base 18: mod_base = OTHER; note = 2'-O-methyladenosine
  modified_base 19: mod_base = cm
  modified_base 20: mod_base = OTHER; note = 2'-O-methyladenosine
  modified_base 21: mod_base = OTHER; note = 2'-O-methyladenosine
  source 1..21: mol_type = other RNA
cggaatgganactgaacacaa

SEQ ID NO: 742 - RNA, 21 nt, synthetic construct
  modified_base 1: mod_base = cm
  modified_base 2: mod_base = gm
  modified_base 3: mod_base = gm
  modified_base 4: mod_base = OTHER; note = 2'-O-methyladenosine
  modified_base 5: mod_base = OTHER; note = 2'-O-methyladenosine
  modified_base 6: mod_base = um
  modified_base 7: mod_base = gm
  modified_base 8: mod_base = gm
  modified_base 9: mod_base = OTHER; note = 2'-fluoroadenosine
  modified_base 10: mod_base = OTHER; note = 2'-fluoroadenosine
  modified_base 11: mod_base = OTHER; note = 2'-fluoroadenosine
  modified_base 12: mod_base = cm
  modified_base 13: mod_base = um
  modified_base 14: mod_base = gm
  modified_base 15: mod_base = OTHER; note = 2'-O-methyladenosine
  modified_base 16: mod_base = OTHER; note = 2'-O-methyladenosine
  modified_base 17: mod_base = cm
  modified_base 18: mod_base = OTHER; note = 2'-O-methyladenosine
  modified_base 19: mod_base = cm
  modified_base 20: mod_base = OTHER; note = 2'-O-methyladenosine
  modified_base 21: mod_base = OTHER; note = 2'-O-methyladenosine
  source 1..21: mol_type = other RNA
cggaatggaaactgaacacaa

SEQ ID NO: 743 - RNA, 21 nt, synthetic construct
  modified_base 1: mod_base = cm
  modified_base 1^2: mod_base = OTHER; note = phosphorothioate linkage
  modified_base 2: mod_base = gm
  modified_base 3: mod_base = gm
  modified_base 4: mod_base = OTHER; note = 2'-O-methyladenosine
  modified_base 5: mod_base = OTHER; note = 2'-O-methyladenosine
  modified_base 6: mod_base = um
  modified_base 7: mod_base = gm
  modified_base 8: mod_base = gm
  modified_base 9: mod_base = OTHER; note = 2'-fluoroadenosine
  modified_base 10: mod_base = OTHER; note = 2'-fluoroadenosine
  modified_base 11: mod_base = OTHER; note = 2'-fluoroadenosine
  modified_base 12: mod_base = cm
  modified_base 13: mod_base = um
  modified_base 14: mod_base = gm
  modified_base 15: mod_base = OTHER; note = 2'-O-methyladenosine
  modified_base 16: mod_base = OTHER; note = 2'-O-methyladenosine
  modified_base 17: mod_base = cm
  modified_base 18: mod_base = OTHER; note = 2'-O-methyladenosine
  modified_base 19: mod_base = cm
  modified_base 20: mod_base = OTHER; note = 2'-O-methyladenosine
  modified_base 21: mod_base = OTHER; note = 2'-O-methyladenosine
  source 1..21: mol_type = other RNA
cggaatggaaactgaacacaa

SEQ ID NO: 744 - RNA, 21 nt, synthetic construct
  modified_base 1: mod_base = cm
  modified_base 1^2: mod_base = OTHER; note = phosphorothioate linkage
  modified_base 2: mod_base = gm
  modified_base 3: mod_base = gm
  modified_base 4: mod_base = OTHER; note = 2'-O-methyladenosine
  modified_base 5: mod_base = OTHER; note = 2'-O-methyladenosine
  modified_base 6: mod_base = um
  modified_base 7: mod_base = gm
  modified_base 8: mod_base = gm
  modified_base 9: mod_base = OTHER; note = 2'-fluoroadenosine
  modified_base 10: mod_base = OTHER; note = 2'-fluoroadenosine
  modified_base 11: mod_base = OTHER; note = 2'-fluoroadenosine
  modified_base 12: mod_base = cm
  modified_base 13: mod_base = um
  modified_base 14: mod_base = gm
  modified_base 15: mod_base = OTHER; note = 2'-O-methyladenosine
  modified_base 16: mod_base = OTHER; note = 2'-O-methyladenosine
  modified_base 17: mod_base = cm
  modified_base 18: mod_base = OTHER; note = 2'-O-methyladenosine
  modified_base 19: mod_base = cm
  modified_base 20: mod_base = OTHER; note = 2'-O-methyladenosine
  modified_base 21: mod_base = OTHER; note = 2'-O-methyladenosine
  source 1..21: mol_type = other RNA
cggaatggaaactgaacacaa

SEQ ID NO: 745 - RNA, 21 nt, synthetic construct
  modified_base 1: mod_base = cm
  modified_base 2: mod_base = gm
  modified_base 3: mod_base = gm
  modified_base 4: mod_base = OTHER; note = 2'-O-methyladenosine
  modified_base 5: mod_base = OTHER; note = 2'-O-methyladenosine
  modified_base 6: mod_base = um
  modified_base 7: mod_base = gm
  modified_base 8: mod_base = gm
  modified_base 9: mod_base = OTHER; note = 2'-fluoroadenosine
  modified_base 10: mod_base = OTHER; note = 2'-fluoroadenosine
  modified_base 11: mod_base = OTHER; note = 2'-fluoroadenosine
  modified_base 12: mod_base = cm
  modified_base 13: mod_base = um
  modified_base 14: mod_base = gm
  modified_base 15: mod_base = OTHER; note = 2'-O-methyladenosine
  modified_base 16: mod_base = OTHER; note = 2'-O-methyladenosine
  modified_base 17: mod_base = cm
  modified_base 18: mod_base = OTHER; note = 2'-O-methyladenosine
  modified_base 19: mod_base = cm
  modified_base 20: mod_base = OTHER; note = 2'-O-methyladenosine
  modified_base 21: mod_base = OTHER; note = 2'-O-methyladenosine
  source 1..21: mol_type = other RNA
cggaatggaaactgaacacaa

SEQ ID NO: 746 - RNA, 21 nt, synthetic construct
  modified_base 1: mod_base = cm
  modified_base 1^2: mod_base = OTHER; note = phosphorothioate linkage
  modified_base 2: mod_base = gm
  modified_base 3: mod_base = gm
  modified_base 4: mod_base = OTHER; note = 2'-O-methyladenosine
  modified_base 5: mod_base = OTHER; note = 2'-O-methyladenosine
  modified_base 6: mod_base = um
  modified_base 7: mod_base = gm
  modified_base 8: mod_base = gm
  modified_base 9: mod_base = OTHER; note = 2'-fluoroadenosine
  modified_base 10: mod_base = OTHER; note = 2'-fluoroadenosine
  modified_base 11: mod_base = OTHER; note = 2'-fluoroadenosine
  modified_base 12: mod_base = cm
  modified_base 13: mod_base = um
  modified_base 14: mod_base = gm
  modified_base 15: mod_base = OTHER; note = 2'-O-methyladenosine
  modified_base 16: mod_base = OTHER; note = 2'-O-methyladenosine
  modified_base 17: mod_base = cm
  modified_base 18: mod_base = OTHER; note = 2'-O-methyladenosine
  modified_base 19: mod_base = cm
  modified_base 20: mod_base = OTHER; note = 2'-O-methyladenosine
  modified_base 21: mod_base = OTHER; note = 2'-O-methyladenosine
  source 1..21: mol_type = other RNA
cggaatggaaactgaacacaa

SEQ ID NO: 747 - RNA, 21 nt, synthetic construct
  modified_base 1: mod_base = cm
  modified_base 2: mod_base = gm
  modified_base 3: mod_base = gm
  modified_base 4: mod_base = OTHER; note = 2'-O-methyladenosine
  modified_base 5: mod_base = OTHER; note = 2'-O-methyladenosine
  modified_base 6: mod_base = um
  modified_base 7: mod_base = gm
  modified_base 8: mod_base = gm
  modified_base 9: mod_base = OTHER; note = 2'-fluoroadenosine
  modified_base 10: mod_base = OTHER; note = 2'-fluoroadenosine
  modified_base 11: mod_base = OTHER; note = 2'-fluoroadenosine
  modified_base 12: mod_base = cm
  modified_base 13: mod_base = um
  modified_base 14: mod_base = gm
  modified_base 15: mod_base = OTHER; note = 2'-O-methyladenosine
  modified_base 16: mod_base = OTHER; note = 2'-O-methyladenosine
  modified_base 17: mod_base = cm
  modified_base 18: mod_base = OTHER; note = 2'-O-methyladenosine
  modified_base 19: mod_base = cm
  modified_base 20: mod_base = OTHER; note = 2'-O-methyladenosine
  modified_base 21: mod_base = OTHER; note = 2'-O-methyladenosine
  source 1..21: mol_type = other RNA
cggaatggaaactgaacacaa

SEQ ID NO: 748 - RNA, 21 nt, synthetic construct
  modified_base 1: mod_base = gm
  modified_base 1^2: mod_base = OTHER; note = phosphorothioate linkage
  modified_base 2: mod_base = OTHER; note = 2'-O-methyladenosine
  modified_base 3: mod_base = um
  modified_base 4: mod_base = gm
  modified_base 5: mod_base = OTHER; note = 2'-O-methyladenosine
  modified_base 6: mod_base = OTHER; note = 2'-O-methyladenosine
  modified_base 7: mod_base = cm
  modified_base 8: mod_base = OTHER; note = 2'-O-methyladenosine
  modified_base 9: mod_base = OTHER; note = 2'-fluoroguanosine
  modified_base 10: mod_base = OTHER; note = 2'-fluoroguanosine
  modified_base 11: mod_base = OTHER; note = 2'-fluoroadenosine
  modified_base 12: mod_base = OTHER; note = 2'-O-methyladenosine
  modified_base 13: mod_base = um
  modified_base 14: mod_base = gm
  modified_base 15: mod_base = gm
  modified_base 16: mod_base = OTHER; note = 2'-O-methyladenosine
  modified_base 17: mod_base = OTHER; note = 2'-O-methyladenosine
  modified_base 18: mod_base = OTHER; note = 2'-O-methyladenosine
  modified_base 19: mod_base = gm
  modified_base 20: mod_base = gm
  modified_base 21: mod_base = OTHER; note = 2'-O-methyladenosine
  source 1..21: mol_type = other RNA
gatgaacaggaatggaaagga

SEQ ID NO: 749 - RNA, 21 nt, synthetic construct
  modified_base 1: mod_base = gm
  modified_base 1^2: mod_base = OTHER; note = phosphorothioate linkage
  modified_base 2: mod_base = OTHER; note = 2'-O-methyladenosine
  modified_base 3: mod_base = um
  modified_base 4: mod_base = gm
  modified_base 5: mod_base = OTHER; note = 2'-O-methyladenosine
  modified_base 6: mod_base = OTHER; note = 2'-O-methyladenosine
  modified_base 7: mod_base = cm
  modified_base 8: mod_base = OTHER; note = 2'-O-methyladenosine
  modified_base 9: mod_base = OTHER; note = 2'-fluoroguanosine
  modified_base 10: mod_base = OTHER; note = 2'-fluoroguanosine
  modified_base 11: mod_base = OTHER; note = 2'-fluoroadenosine
  modified_base 12: mod_base = OTHER; note = 2'-O-methyladenosine
  modified_base 13: mod_base = um
  modified_base 14: mod_base = gm
  modified_base 15: mod_base = gm
  modified_base 16: mod_base = OTHER; note = 2'-O-methyladenosine
  modified_base 17: mod_base = OTHER; note = 2'-O-methyladenosine
  modified_base 18: mod_base = OTHER; note = 2'-O-methyladenosine
  modified_base 19: mod_base = gm
  modified_base 20: mod_base = OTHER; note = 2 -O-methylinosine
  modified_base 21: mod_base = OTHER; note = 2'-O-methyladenosine
  source 1..21: mol_type = other RNA
gatgaacaggaatggaaagna

SEQ ID NO: 750 - RNA, 21 nt, synthetic construct
  modified_base 1: mod_base = gm
  modified_base 1^2: mod_base = OTHER; note = phosphorothioate linkage
  modified_base 2: mod_base = OTHER; note = 2'-O-methyladenosine
  modified_base 3: mod_base = cm
  modified_base 4: mod_base = um
  modified_base 5: mod_base = OTHER; note = 2'-O-methyladenosine
  modified_base 6: mod_base = cm
  modified_base 7: mod_base = cm
  modified_base 8: mod_base = gm
  modified_base 9: mod_base = OTHER; note = 2'-fluoroadenosine
  modified_base 10: mod_base = OTHER; note = 2'-fluoroguanosine
  modified_base 11: mod_base = OTHER; note = 2'-fluorouridine
  modified_base 12: mod_base = cm
  modified_base 13: mod_base = cm
  modified_base 14: mod_base = gm
  modified_base 15: mod_base = um
  modified_base 16: mod_base = gm
  modified_base 17: mod_base = um
  modified_base 18: mod_base = cm
  modified_base 19: mod_base = um
  modified_base 20: mod_base = OTHER; note = 2'-O-methyladenosine
  modified_base 21: mod_base = OTHER; note = 2'-O-methyladenosine
  source 1..21: mol_type = other RNA
gactaccgagtccgtgtctaa

SEQ ID NO: 751 - RNA, 21 nt, synthetic construct
  modified_base 1: mod_base = um
  modified_base 1^2: mod_base = OTHER; note = phosphorothioate linkage
  modified_base 2: mod_base = gm
  modified_base 3: mod_base = cm
  modified_base 4: mod_base = cm
  modified_base 5: mod_base = um
  modified_base 6: mod_base = OTHER; note = 2'-O-methyladenosine
  modified_base 7: mod_base = OTHER; note = 2'-O-methyladenosine
  modified_base 8: mod_base = um
  modified_base 9: mod_base = OTHER; note = 2'-fluoroguanosine
  modified_base 10: mod_base = OTHER; note = 2'-fluoroadenosine
  modified_base 11: mod_base = OTHER; note = 2'-fluoroguanosine
  modified_base 12: mod_base = OTHER; note = 2'-O-methyladenosine
  modified_base 13: mod_base = OTHER; note = 2'-O-methyladenosine
  modified_base 14: mod_base = gm
  modified_base 15: mod_base = gm
  modified_base 16: mod_base = gm
  modified_base 17: mod_base = OTHER; note = 2'-O-methyladenosine
  modified_base 18: mod_base = gm
  modified_base 19: mod_base = um
  modified_base 20: mod_base = OTHER; note = 2'-O-methyladenosine
  modified_base 21: mod_base = um
  source 1..21: mol_type = other RNA
tgcctaatgagaagggagtat

SEQ ID NO: 752 - RNA, 21 nt, synthetic construct
  modified_base 1: mod_base = gm
  modified_base 1^2: mod_base = OTHER; note = phosphorothioate linkage
  modified_base 2: mod_base = OTHER; note = 2'-O-methyladenosine
  modified_base 3: mod_base = gm
  modified_base 4: mod_base = um
  modified_base 5: mod_base = OTHER; note = 2'-O-methyladenosine
  modified_base 6: mod_base = gm
  modified_base 7: mod_base = gm
  modified_base 8: mod_base = um
  modified_base 9: mod_base = OTHER; note = 2'-fluoroguanosine
  modified_base 10: mod_base = cm
  modified_base 11: mod_base = OTHER; note = 2'-fluorouridine
  modified_base 12: mod_base = cm
  modified_base 13: mod_base = OTHER; note = 2'-fluoroadenosine
  modified_base 14: mod_base = OTHER; note = 2'-O-methyladenosine
  modified_base 15: mod_base = OTHER; note = 2'-O-methyladenosine
  modified_base 16: mod_base = OTHER; note = 2'-O-methyladenosine
  modified_base 17: mod_base = cm
  modified_base 18: mod_base = OTHER; note = 2'-O-methyladenosine
  modified_base 19: mod_base = um
  modified_base 20: mod_base = cm
  modified_base 21: mod_base = OTHER; note = 2'-O-methyladenosine
  source 1..21: mol_type = other RNA
gagtaggtgctcaaaacatca

SEQ ID NO: 753 - RNA, 21 nt, synthetic construct
  modified_base 1: mod_base = gm
  modified_base 1^2: mod_base = OTHER; note = phosphorothioate linkage
  modified_base 2: mod_base = OTHER; note = 2'-O-methyladenosine
  modified_base 3: mod_base = gm
  modified_base 4: mod_base = um
  modified_base 5: mod_base = OTHER; note = 2'-O-methyladenosine
  modified_base 6: mod_base = gm
  modified_base 7: mod_base = OTHER; note = 2 -O-methylinosine
  modified_base 8: mod_base = um
  modified_base 9: mod_base = OTHER; note = 2'-fluoroguanosine
  modified_base 10: mod_base = cm
  modified_base 11: mod_base = OTHER; note = 2'-fluorouridine
  modified_base 12: mod_base = cm
  modified_base 13: mod_base = OTHER; note = 2'-fluoroadenosine
  modified_base 14: mod_base = OTHER; note = 2'-O-methyladenosine
  modified_base 15: mod_base = OTHER; note = 2'-O-methyladenosine
  modified_base 16: mod_base = OTHER; note = 2'-O-methyladenosine
  modified_base 17: mod_base = cm
  modified_base 18: mod_base = OTHER; note = 2'-O-methyladenosine
  modified_base 19: mod_base = um
  modified_base 20: mod_base = cm
  modified_base 21: mod_base = OTHER; note = 2'-O-methyladenosine
  source 1..21: mol_type = other RNA
gagtagntgctcaaaacatca

SEQ ID NO: 754 - RNA, 21 nt, synthetic construct
  modified_base 1: mod_base = gm
  modified_base 1^2: mod_base = OTHER; note = phosphorothioate linkage
  modified_base 2: mod_base = OTHER; note = 2'-O-methyladenosine
  modified_base 3: mod_base = gm
  modified_base 4: mod_base = um
  modified_base 5: mod_base = OTHER; note = 2'-O-methyladenosine
  modified_base 6: mod_base = gm
  modified_base 7: mod_base = OTHER; note = 2'-fluoroguanosine
  modified_base 8: mod_base = um
  modified_base 9: mod_base = OTHER; note = 2'-fluoroguanosine
  modified_base 10: mod_base = cm
  modified_base 11: mod_base = OTHER; note = 2'-fluorouridine
  modified_base 12: mod_base = cm
  modified_base 13: mod_base = OTHER; note = 2'-O-methyladenosine
  modified_base 14: mod_base = OTHER; note = 2'-O-methyladenosine
  modified_base 15: mod_base = OTHER; note = 2'-O-methyladenosine
  modified_base 16: mod_base = OTHER; note = 2'-O-methyladenosine
  modified_base 17: mod_base = cm
  modified_base 18: mod_base = OTHER; note = 2'-O-methyladenosine
  modified_base 19: mod_base = um
  modified_base 20: mod_base = cm
  modified_base 21: mod_base = OTHER; note = 2'-O-methyladenosine
  source 1..21: mol_type = other RNA
gagtaggtgctcaaaacatca

SEQ ID NO: 755 - RNA, 21 nt, synthetic construct
  modified_base 1: mod_base = gm
  modified_base 1^2: mod_base = OTHER; note = phosphorothioate linkage
  modified_base 2: mod_base = OTHER; note = 2'-O-methyladenosine
  modified_base 3: mod_base = gm
  modified_base 4: mod_base = um
  modified_base 5: mod_base = OTHER; note = 2'-O-methyladenosine
  modified_base 6: mod_base = gm
  modified_base 7: mod_base = gm
  modified_base 8: mod_base = um
  modified_base 9: mod_base = OTHER; note = 2'-fluoroguanosine
  modified_base 10: mod_base = cm
  modified_base 11: mod_base = OTHER; note = 2'-fluorouridine
  modified_base 12: mod_base = cm
  modified_base 13: mod_base = OTHER; note = 2'-O-methyladenosine
  modified_base 14: mod_base = OTHER; note = 2'-O-methyladenosine
  modified_base 15: mod_base = OTHER; note = 2'-O-methyladenosine
  modified_base 16: mod_base = OTHER; note = 2'-O-methyladenosine
  modified_base 17: mod_base = cm
  modified_base 18: mod_base = OTHER; note = 2'-O-methyladenosine
  modified_base 19: mod_base = um
  modified_base 20: mod_base = cm
  modified_base 21: mod_base = OTHER; note = 2'-O-methyladenosine
  source 1..21: mol_type = other RNA
gagtaggtgctcaaaacatca

SEQ ID NO: 756 - RNA, 21 nt, synthetic construct
  modified_base 1: mod_base = OTHER; note = 2'-O-methyladenosine
  modified_base 1^2: mod_base = OTHER; note = phosphorothioate linkage
  modified_base 2: mod_base = gm
  modified_base 3: mod_base = gm
  modified_base 4: mod_base = cm
  modified_base 5: mod_base = OTHER; note = 2'-O-methyladenosine
  modified_base 6: mod_base = OTHER; note = 2'-O-methyladenosine
  modified_base 7: mod_base = OTHER; note = 2'-fluorouridine
  modified_base 8: mod_base = gm
  modified_base 9: mod_base = OTHER; note = 2'-fluoroadenosine
  modified_base 10: mod_base = OTHER; note = 2'-O-methyladenosine
  modified_base 11: mod_base = OTHER; note = 2'-fluorocytidine
  modified_base 12: mod_base = OTHER; note = 2'-O-methyladenosine
  modified_base 13: mod_base = gm
  modified_base 14: mod_base = gm
  modified_base 15: mod_base = OTHER; note = 2'-O-methyladenosine
  modified_base 16: mod_base = OTHER; note = 2'-O-methyladenosine
  modified_base 17: mod_base = um
  modified_base 18: mod_base = OTHER; note = 2 -O-methylinosine
  modified_base 19: mod_base = gm
  modified_base 20: mod_base = OTHER; note = 2'-O-methyladenosine
  modified_base 21: mod_base = OTHER; note = 2'-O-methyladenosine
  source 1..21: mol_type = other RNA
aggcaatgaacaggaatngaa

SEQ ID NO: 757 - RNA, 21 nt, synthetic construct
  modified_base 1: mod_base = OTHER; note = 2'-O-methyladenosine
  modified_base 1^2: mod_base = OTHER; note = phosphorothioate linkage
  modified_base 2: mod_base = gm
  modified_base 3: mod_base = gm
  modified_base 4: mod_base = cm
  modified_base 5: mod_base = OTHER; note = 2'-O-methyladenosine
  modified_base 6: mod_base = OTHER; note = 2'-O-methyladenosine
  modified_base 7: mod_base = OTHER; note = 2'-fluorouridine
  modified_base 8: mod_base = gm
  modified_base 9: mod_base = OTHER; note = 2'-fluoroadenosine
  modified_base 10: mod_base = OTHER; note = 2'-O-methyladenosine
  modified_base 11: mod_base = OTHER; note = 2'-fluorocytidine
  modified_base 12: mod_base = OTHER; note = 2'-O-methyladenosine
  modified_base 13: mod_base = gm
  modified_base 14: mod_base = gm
  modified_base 15: mod_base = OTHER; note = 2'-O-methyladenosine
  modified_base 16: mod_base = OTHER; note = 2'-O-methyladenosine
  modified_base 17: mod_base = um
  modified_base 18: mod_base = gm
  modified_base 19: mod_base = gm
  modified_base 20: mod_base = OTHER; note = 2'-O-methyladenosine
  modified_base 21: mod_base = OTHER; note = 2'-O-methyladenosine
  source 1..21: mol_type = other RNA
aggcaatgaacaggaatggaa

SEQ ID NO: 758 - RNA, 21 nt, synthetic construct
  modified_base 1: mod_base = OTHER; note = 2'-O-methyladenosine
  modified_base 1^2: mod_base = OTHER; note = phosphorothioate linkage
  modified_base 2: mod_base = gm
  modified_base 3: mod_base = gm
  modified_base 4: mod_base = cm
  modified_base 5: mod_base = OTHER; note = 2'-O-methyladenosine
  modified_base 6: mod_base = OTHER; note = 2'-O-methyladenosine
  modified_base 7: mod_base = OTHER; note = 2'-fluorouridine
  modified_base 8: mod_base = gm
  modified_base 9: mod_base = OTHER; note = 2'-fluoroadenosine
  modified_base 10: mod_base = OTHER; note = 2'-O-methyladenosine
  modified_base 11: mod_base = OTHER; note = 2'-fluorocytidine
  modified_base 12: mod_base = OTHER; note = 2'-O-methyladenosine
  modified_base 13: mod_base = gm
  modified_base 14: mod_base = gm
  modified_base 15: mod_base = OTHER; note = 2'-O-methyladenosine
  modified_base 16: mod_base = OTHER; note = 2'-O-methyladenosine
  modified_base 17: mod_base = um
  modified_base 18: mod_base = gm
  modified_base 19: mod_base = OTHER; note = 2 -O-methylinosine
  modified_base 20: mod_base = OTHER; note = 2'-O-methyladenosine
  modified_base 21: mod_base = OTHER; note = 2'-O-methyladenosine
  source 1..21: mol_type = other RNA
aggcaatgaacaggaatgnaa

SEQ ID NO: 759 - RNA, 21 nt, synthetic construct
  modified_base 1: mod_base = OTHER; note = 2'-O-methyladenosine
  modified_base 1^2: mod_base = OTHER; note = phosphorothioate linkage
  modified_base 2: mod_base = gm
  modified_base 3: mod_base = gm
  modified_base 4: mod_base = cm
  modified_base 5: mod_base = OTHER; note = 2'-O-methyladenosine
  modified_base 6: mod_base = OTHER; note = 2'-O-methyladenosine
  modified_base 7: mod_base = OTHER; note = 2'-fluorouridine
  modified_base 8: mod_base = gm
  modified_base 9: mod_base = OTHER; note = 2'-fluoroadenosine
  modified_base 10: mod_base = OTHER; note = 2'-O-methyladenosine
  modified_base 11: mod_base = OTHER; note = 2'-fluorocytidine
  modified_base 12: mod_base = OTHER; note = 2'-O-methyladenosine
  modified_base 13: mod_base = gm
  modified_base 14: mod_base = OTHER; note = 2 -O-methylinosine
  modified_base 15: mod_base = OTHER; note = 2'-O-methyladenosine
  modified_base 16: mod_base = OTHER; note = 2'-O-methyladenosine
  modified_base 17: mod_base = um
  modified_base 18: mod_base = gm
  modified_base 19: mod_base = gm
  modified_base 20: mod_base = OTHER; note = 2'-O-methyladenosine
  modified_base 21: mod_base = OTHER; note = 2'-O-methyladenosine
  source 1..21: mol_type = other RNA
aggcaatgaacagnaatggaa

SEQ ID NO: 760 - RNA, 21 nt, synthetic construct
  modified_base 1: mod_base = OTHER; note = 2'-O-methyladenosine
  modified_base 1^2: mod_base = OTHER; note = phosphorothioate linkage
  modified_base 2: mod_base = gm
  modified_base 3: mod_base = gm
  modified_base 4: mod_base = cm
  modified_base 5: mod_base = OTHER; note = 2'-O-methyladenosine
  modified_base 6: mod_base = OTHER; note = 2'-O-methyladenosine
  modified_base 7: mod_base = OTHER; note = 2'-fluorouridine
  modified_base 8: mod_base = gm
  modified_base 9: mod_base = OTHER; note = 2'-fluoroadenosine
  modified_base 10: mod_base = OTHER; note = 2'-O-methyladenosine
  modified_base 11: mod_base = OTHER; note = 2'-fluorocytidine
  modified_base 12: mod_base = OTHER; note = 2'-O-methyladenosine
  modified_base 13: mod_base = OTHER; note = 2 -O-methylinosine
  modified_base 14: mod_base = gm
  modified_base 15: mod_base = OTHER; note = 2'-O-methyladenosine
  modified_base 16: mod_base = OTHER; note = 2'-O-methyladenosine
  modified_base 17: mod_base = um
  modified_base 18: mod_base = gm
  modified_base 19: mod_base = gm
  modified_base 20: mod_base = OTHER; note = 2'-O-methyladenosine
  modified_base 21: mod_base = OTHER; note = 2'-O-methyladenosine
  source 1..21: mol_type = other RNA
aggcaatgaacangaatggaa

SEQ ID NO: 761 - RNA, 21 nt, synthetic construct
  modified_base 1: mod_base = gm
  modified_base 1^2: mod_base = OTHER; note = phosphorothioate linkage
  modified_base 2: mod_base = gm
  modified_base 3: mod_base = gm
  modified_base 4: mod_base = cm
  modified_base 5: mod_base = OTHER; note = 2'-O-methyladenosine
  modified_base 6: mod_base = OTHER; note = 2'-O-methyladenosine
  modified_base 7: mod_base = OTHER; note = 2'-fluorouridine
  modified_base 8: mod_base = gm
  modified_base 9: mod_base = OTHER; note = 2'-fluoroadenosine
  modified_base 10: mod_base = OTHER; note = 2'-O-methyladenosine
  modified_base 11: mod_base = OTHER; note = 2'-fluorocytidine
  modified_base 12: mod_base = OTHER; note = 2'-O-methyladenosine
  modified_base 13: mod_base = gm
  modified_base 14: mod_base = gm
  modified_base 15: mod_base = OTHER; note = 2'-O-methyladenosine
  modified_base 16: mod_base = OTHER; note = 2'-O-methyladenosine
  modified_base 17: mod_base = um
  modified_base 18: mod_base = OTHER; note = 2 -O-methylinosine
  modified_base 19: mod_base = gm
  modified_base 20: mod_base = OTHER; note = 2'-O-methyladenosine
  modified_base 21: mod_base = OTHER; note = 2'-O-methyladenosine
  source 1..21: mol_type = other RNA
gggcaatgaacaggaatngaa

SEQ ID NO: 762 - RNA, 21 nt, synthetic construct
  modified_base 1: mod_base = cm
  modified_base 1^2: mod_base = OTHER; note = phosphorothioate linkage
  modified_base 2: mod_base = OTHER; note = 2'-O-methyladenosine
  modified_base 3: mod_base = gm
  modified_base 4: mod_base = um
  modified_base 5: mod_base = OTHER; note = 2'-O-methyladenosine
  modified_base 6: mod_base = gm
  modified_base 7: mod_base = OTHER; note = 2'-fluoroguanosine
  modified_base 8: mod_base = um
  modified_base 9: mod_base = OTHER; note = 2'-fluoroguanosine
  modified_base 10: mod_base = cm
  modified_base 11: mod_base = OTHER; note = 2'-fluorouridine
  modified_base 12: mod_base = cm
  modified_base 13: mod_base = OTHER; note = 2'-O-methyladenosine
  modified_base 14: mod_base = OTHER; note = 2'-O-methyladenosine
  modified_base 15: mod_base = OTHER; note = 2'-O-methyladenosine
  modified_base 16: mod_base = OTHER; note = 2'-O-methyladenosine
  modified_base 17: mod_base = cm
  modified_base 18: mod_base = OTHER; note = 2'-O-methyladenosine
  modified_base 19: mod_base = um
  modified_base 20: mod_base = cm
  modified_base 21: mod_base = OTHER; note = 2'-O-methyladenosine
  source 1..21: mol_type = other RNA
cagtaggtgctcaaaacatca

SEQ ID NO: 763 - RNA, 21 nt, synthetic construct
  modified_base 1: mod_base = um
  modified_base 1^2: mod_base = OTHER; note = phosphorothioate linkage
  modified_base 2: mod_base = OTHER; note = 2 -O-methyl-2-aminoadenosine
  modified_base 3: mod_base = gm
  modified_base 4: mod_base = um
  modified_base 5: mod_base = OTHER; note = 2'-O-methyladenosine
  modified_base 6: mod_base = gm
  modified_base 7: mod_base = OTHER; note = 2'-fluoroguanosine
  modified_base 8: mod_base = um
  modified_base 9: mod_base = OTHER; note = 2'-fluoroguanosine
  modified_base 10: mod_base = cm
  modified_base 11: mod_base = OTHER; note = 2'-fluorouridine
  modified_base 12: mod_base = cm
  modified_base 13: mod_base = OTHER; note = 2'-O-methyladenosine
  modified_base 14: mod_base = OTHER; note = 2'-O-methyladenosine
  modified_base 15: mod_base = OTHER; note = 2'-O-methyladenosine
  modified_base 16: mod_base = OTHER; note = 2'-O-methyladenosine
  modified_base 17: mod_base = cm
  modified_base 18: mod_base = OTHER; note = 2'-O-methyladenosine
  modified_base 19: mod_base = um
  modified_base 20: mod_base = cm
  modified_base 21: mod_base = OTHER; note = 2'-O-methyladenosine
  source 1..21: mol_type = other RNA
tngtaggtgctcaaaacatca

SEQ ID NO: 764 - RNA, 21 nt, synthetic construct
  modified_base 1: mod_base = gm
  modified_base 1^2: mod_base = OTHER; note = phosphorothioate linkage
  modified_base 2: mod_base = OTHER; note = 2'-O-methyladenosine
  modified_base 3: mod_base = gm
  modified_base 4: mod_base = um
  modified_base 5: mod_base = OTHER; note = 2'-O-methyladenosine
  modified_base 6: mod_base = gm
  modified_base 7: mod_base = gm
  modified_base 8: mod_base = um
  modified_base 9: mod_base = OTHER; note = 2'-fluoroguanosine
  modified_base 10: mod_base = cm
  modified_base 11: mod_base = OTHER; note = 2'-fluorouridine
  modified_base 12: mod_base = OTHER; note = 2'-fluorocytidine
  modified_base 13: mod_base = OTHER; note = 2'-O-methyladenosine
  modified_base 14: mod_base = OTHER; note = 2'-O-methyladenosine
  modified_base 15: mod_base = OTHER; note = 2'-O-methyladenosine
  modified_base 16: mod_base = OTHER; note = 2'-O-methyladenosine
  modified_base 17: mod_base = cm
  modified_base 18: mod_base = OTHER; note = 2'-O-methyladenosine
  modified_base 19: mod_base = um
  modified_base 20: mod_base = cm
  modified_base 21: mod_base = OTHER; note = 2'-O-methyladenosine
  source 1..21: mol_type = other RNA
gagtaggtgctcaaaacatca

SEQ ID NO: 765 - RNA, 21 nt, synthetic construct
  modified_base 1: mod_base = OTHER; note = 2'-O-methyladenosine
  modified_base 1^2: mod_base = OTHER; note = phosphorothioate linkage
  modified_base 2: mod_base = gm
  modified_base 3: mod_base = gm
  modified_base 4: mod_base = cm
  modified_base 5: mod_base = OTHER; note = 2'-O-methyladenosine
  modified_base 6: mod_base = OTHER; note = 2'-O-methyladenosine
  modified_base 7: mod_base = um
  modified_base 8: mod_base = gm
  modified_base 9: mod_base = OTHER; note = 2'-fluoroadenosine
  modified_base 10: mod_base = OTHER; note = 2'-fluoroadenosine
  modified_base 11: mod_base = OTHER; note = 2'-fluorocytidine
  modified_base 12: mod_base = OTHER; note = 2'-O-methyladenosine
  modified_base 13: mod_base = gm
  modified_base 14: mod_base = gm
  modified_base 15: mod_base = OTHER; note = 2'-O-methyladenosine
  modified_base 16: mod_base = OTHER; note = 2'-O-methyladenosine
  modified_base 17: mod_base = um
  modified_base 18: mod_base = gm
  modified_base 19: mod_base = gm
  modified_base 20: mod_base = OTHER; note = 2'-O-methyladenosine
  modified_base 21: mod_base = OTHER; note = 2'-O-methyladenosine
  source 1..21: mol_type = other RNA
aggcaatgaacaggaatggaa

SEQ ID NO: 766 - RNA, 21 nt, synthetic construct
  modified_base 1: mod_base = gm
  modified_base 1^2: mod_base = OTHER; note = phosphorothioate linkage
  modified_base 2: mod_base = OTHER; note = 2'-O-methyladenosine
  modified_base 3: mod_base = gm
  modified_base 4: mod_base = um
  modified_base 5: mod_base = OTHER; note = 2'-O-methyladenosine
  modified_base 6: mod_base = gm
  modified_base 7: mod_base = OTHER; note = 2'-fluoroguanosine
  modified_base 8: mod_base = um
  modified_base 9: mod_base = OTHER; note = 2'-fluoroguanosine
  modified_base 10: mod_base = cm
  modified_base 11: mod_base = OTHER; note = 2'-fluorouridine
  modified_base 12: mod_base = cm
  modified_base 13: mod_base = OTHER; note = 2'-O-methyladenosine
  modified_base 14: mod_base = OTHER; note = 2'-O-methyladenosine
  modified_base 15: mod_base = OTHER; note = 2'-O-methyladenosine
  modified_base 16: mod_base = OTHER; note = 2'-O-methyladenosine
  modified_base 17: mod_base = cm
  modified_base 18: mod_base = OTHER; note = 2'-O-methyladenosine
  modified_base 19: mod_base = um
  modified_base 20: mod_base = cm
  modified_base 21: mod_base = OTHER; note = 2'-O-methyladenosine
  source 1..21: mol_type = other RNA
gagtaggtgctcaaaacatca

SEQ ID NO: 767 - RNA, 21 nt, synthetic construct
  modified_base 1: mod_base = OTHER; note = 2'-O-methyladenosine
  modified_base 1^2: mod_base = OTHER; note = phosphorothioate linkage
  modified_base 2: mod_base = gm
  modified_base 3: mod_base = gm
  modified_base 4: mod_base = cm
  modified_base 5: mod_base = OTHER; note = 2'-O-methyladenosine
  modified_base 6: mod_base = OTHER; note = 2'-O-methyladenosine
  modified_base 7: mod_base = um
  modified_base 8: mod_base = gm
  modified_base 9: mod_base = OTHER; note = 2'-fluoroadenosine
  modified_base 10: mod_base = OTHER; note = 2'-fluoroadenosine
  modified_base 11: mod_base = OTHER; note = 2'-fluorocytidine
  modified_base 12: mod_base = OTHER; note = 2'-O-methyladenosine
  modified_base 13: mod_base = gm
  modified_base 14: mod_base = gm
  modified_base 15: mod_base = OTHER; note = 2'-O-methyladenosine
  modified_base 16: mod_base = OTHER; note = 2'-O-methyladenosine
  modified_base 17: mod_base = um
  modified_base 18: mod_base = OTHER; note = 2 -O-methylinosine
  modified_base 19: mod_base = gm
  modified_base 20: mod_base = OTHER; note = 2'-O-methyladenosine
  modified_base 21: mod_base = OTHER; note = 2'-O-methyladenosine
  source 1..21: mol_type = other RNA
aggcaatgaacaggaatngaa

SEQ ID NO: 768 - RNA, 21 nt, synthetic construct
  modified_base 1: mod_base = cm
  modified_base 1^2: mod_base = OTHER; note = phosphorothioate linkage
  modified_base 2: mod_base = gm
  modified_base 3: mod_base = gm
  modified_base 4: mod_base = OTHER; note = 2'-O-methyladenosine
  modified_base 5: mod_base = OTHER; note = 2'-O-methyladenosine
  modified_base 6: mod_base = um
  modified_base 7: mod_base = gm
  modified_base 8: mod_base = gm
  modified_base 9: mod_base = OTHER; note = 2'-fluoroadenosine
  modified_base 10: mod_base = OTHER; note = 2'-fluoroadenosine
  modified_base 11: mod_base = OTHER; note = 2'-fluoroadenosine
  modified_base 12: mod_base = cm
  modified_base 13: mod_base = um
  modified_base 14: mod_base = gm
  modified_base 15: mod_base = OTHER; note = 2'-O-methyladenosine
  modified_base 16: mod_base = OTHER; note = 2'-O-methyladenosine
  modified_base 17: mod_base = cm
  modified_base 18: mod_base = OTHER; note = 2'-O-methyladenosine
  modified_base 19: mod_base = cm
  modified_base 20: mod_base = OTHER; note = 2'-O-methyladenosine
  modified_base 21: mod_base = OTHER; note = 2'-O-methyladenosine
  source 1..21: mol_type = other RNA
cggaatggaaactgaacacaa

SEQ ID NO: 769 - RNA, 21 nt, synthetic construct
  modified_base 1: mod_base = cm
  modified_base 1^2: mod_base = OTHER; note = phosphorothioate linkage
  modified_base 2: mod_base = gm
  modified_base 3: mod_base = gm
  modified_base 4: mod_base = OTHER; note = 2'-O-methyladenosine
  modified_base 5: mod_base = OTHER; note = 2'-O-methyladenosine
  modified_base 6: mod_base = um
  modified_base 7: mod_base = gm
  modified_base 8: mod_base = gm
  modified_base 9: mod_base = OTHER; note = 2'-fluoroadenosine
  modified_base 10: mod_base = OTHER; note = 2'-O-methyladenosine
  modified_base 11: mod_base = OTHER; note = 2'-fluoroadenosine
  modified_base 12: mod_base = cm
  modified_base 13: mod_base = OTHER; note = 2'-fluorouridine
  modified_base 14: mod_base = gm
  modified_base 15: mod_base = OTHER; note = 2'-O-methyladenosine
  modified_base 16: mod_base = OTHER; note = 2'-O-methyladenosine
  modified_base 17: mod_base = cm
  modified_base 18: mod_base = OTHER; note = 2'-O-methyladenosine
  modified_base 19: mod_base = cm
  modified_base 20: mod_base = OTHER; note = 2'-O-methyladenosine
  modified_base 21: mod_base = OTHER; note = 2'-O-methyladenosine
  source 1..21: mol_type = other RNA
cggaatggaaactgaacacaa

SEQ ID NO: 770 - RNA, 21 nt, synthetic construct
  modified_base 1: mod_base = cm
  modified_base 1^2: mod_base = OTHER; note = phosphorothioate linkage
  modified_base 2: mod_base = cm
  modified_base 3: mod_base = um
  modified_base 4: mod_base = gm
  modified_base 5: mod_base = gm
  modified_base 6: mod_base = gm
  modified_base 7: mod_base = OTHER; note = 2'-O-methyladenosine
  modified_base 8: mod_base = OTHER; note = 2'-O-methyladenosine
  modified_base 9: mod_base = OTHER; note = 2'-fluoroguanosine
  modified_base 10: mod_base = OTHER; note = 2'-fluorocytidine
  modified_base 11: mod_base = OTHER; note = 2'-fluorocytidine
  modified_base 12: mod_base = OTHER; note = 2'-O-methyladenosine
  modified_base 13: mod_base = gm
  modified_base 14: mod_base = OTHER; note = 2'-O-methyladenosine
  modified_base 15: mod_base = OTHER; note = 2'-O-methyladenosine
  modified_base 16: mod_base = OTHER; note = 2'-O-methyladenosine
  modified_base 17: mod_base = um
  modified_base 18: mod_base = um
  modified_base 19: mod_base = gm
  modified_base 20: mod_base = um
  modified_base 21: mod_base = OTHER; note = 2'-O-methyladenosine
  source 1..21: mol_type = other RNA
cctgggaagccagaaattgta

SEQ ID NO: 771 - RNA, 21 nt, synthetic construct
  modified_base 1: mod_base = cm
  modified_base 1^2: mod_base = OTHER; note = phosphorothioate linkage
  modified_base 2: mod_base = gm
  modified_base 3: mod_base = gm
  modified_base 4: mod_base = OTHER; note = 2'-O-methyladenosine
  modified_base 5: mod_base = OTHER; note = 2'-O-methyladenosine
  modified_base 6: mod_base = um
  modified_base 7: mod_base = gm
  modified_base 8: mod_base = gm
  modified_base 9: mod_base = OTHER; note = 2'-fluoroadenosine
  modified_base 10: mod_base = OTHER; note = 2'-fluoroadenosine
  modified_base 11: mod_base = OTHER; note = 2'-fluoroadenosine
  modified_base 12: mod_base = cm
  modified_base 13: mod_base = um
  modified_base 14: mod_base = gm
  modified_base 15: mod_base = OTHER; note = 2'-O-methyladenosine
  modified_base 16: mod_base = OTHER; note = 2'-O-methyladenosine
  modified_base 17: mod_base = cm
  modified_base 18: mod_base = OTHER; note = 2'-O-methyladenosine
  modified_base 19: mod_base = cm
  modified_base 20: mod_base = OTHER; note = 2'-O-methyladenosine
  modified_base 21: mod_base = OTHER; note = 2'-O-methyladenosine
  source 1..21: mol_type = other RNA
cggaatggaaactgaacacaa

SEQ ID NO: 772 - RNA, 21 nt, synthetic construct
  modified_base 1: mod_base = cm
  modified_base 1^2: mod_base = OTHER; note = phosphorothioate linkage
  modified_base 2: mod_base = gm
  modified_base 3: mod_base = gm
  modified_base 4: mod_base = OTHER; note = 2'-O-methyladenosine
  modified_base 5: mod_base = OTHER; note = 2'-O-methyladenosine
  modified_base 6: mod_base = um
  modified_base 7: mod_base = gm
  modified_base 8: mod_base = gm
  modified_base 9: mod_base = OTHER; note = 2'-fluoroadenosine
  modified_base 10: mod_base = OTHER; note = 2'-fluoroadenosine
  modified_base 11: mod_base = OTHER; note = 2'-fluoroadenosine
  modified_base 12: mod_base = cm
  modified_base 13: mod_base = um
  modified_base 14: mod_base = gm
  modified_base 15: mod_base = OTHER; note = 2'-O-methyladenosine
  modified_base 16: mod_base = OTHER; note = 2'-O-methyladenosine
  modified_base 17: mod_base = cm
  modified_base 18: mod_base = OTHER; note = 2'-O-methyladenosine
  modified_base 19: mod_base = cm
  modified_base 20: mod_base = OTHER; note = 2'-O-methyladenosine
  modified_base 21: mod_base = OTHER; note = 2'-O-methyladenosine
  source 1..21: mol_type = other RNA
cggaatggaaactgaacacaa

SEQ ID NO: 773 - RNA, 21 nt, synthetic construct
  modified_base 1: mod_base = cm
  modified_base 2: mod_base = gm
  modified_base 3: mod_base = gm
  modified_base 4: mod_base = OTHER; note = 2'-O-methyladenosine
  modified_base 5: mod_base = OTHER; note = 2'-O-methyladenosine
  modified_base 6: mod_base = um
  modified_base 7: mod_base = gm
  modified_base 8: mod_base = gm
  modified_base 9: mod_base = OTHER; note = 2'-fluoroadenosine
  modified_base 10: mod_base = OTHER; note = 2'-fluoroadenosine
  modified_base 11: mod_base = OTHER; note = 2'-fluoroadenosine
  modified_base 12: mod_base = cm
  modified_base 13: mod_base = um
  modified_base 14: mod_base = gm
  modified_base 15: mod_base = OTHER; note = 2'-O-methyladenosine
  modified_base 16: mod_base = OTHER; note = 2'-O-methyladenosine
  modified_base 17: mod_base = cm
  modified_base 18: mod_base = OTHER; note = 2'-O-methyladenosine
  modified_base 19: mod_base = cm
  modified_base 20: mod_base = OTHER; note = 2'-O-methyladenosine
  modified_base 21: mod_base = OTHER; note = 2'-O-methyladenosine
  source 1..21: mol_type = other RNA
cggaatggaaactgaacacaa

SEQ ID NO: 774 - RNA, 21 nt, synthetic construct
  modified_base 1: mod_base = cm
  modified_base 1^2: mod_base = OTHER; note = phosphorothioate linkage
  modified_base 2: mod_base = gm
  modified_base 3: mod_base = gm
  modified_base 4: mod_base = OTHER; note = 2'-O-methyladenosine
  modified_base 5: mod_base = OTHER; note = 2'-O-methyladenosine
  modified_base 6: mod_base = um
  modified_base 7: mod_base = gm
  modified_base 8: mod_base = gm
  modified_base 9: mod_base = OTHER; note = 2'-fluoroadenosine
  modified_base 10: mod_base = OTHER; note = 2'-fluoroadenosine
  modified_base 11: mod_base = OTHER; note = 2'-fluoroadenosine
  modified_base 12: mod_base = cm
  modified_base 13: mod_base = um
  modified_base 14: mod_base = gm
  modified_base 15: mod_base = OTHER; note = 2'-O-methyladenosine
  modified_base 16: mod_base = OTHER; note = 2'-O-methyladenosine
  modified_base 17: mod_base = cm
  modified_base 18: mod_base = OTHER; note = 2'-O-methyladenosine
  modified_base 19: mod_base = cm
  modified_base 20: mod_base = OTHER; note = 2'-O-methyladenosine
  modified_base 21: mod_base = OTHER; note = 2'-O-methyladenosine
  source 1..21: mol_type = other RNA
cggaatggaaactgaacacaa

SEQ ID NO: 775 - RNA, 21 nt, synthetic construct
  modified_base 1: mod_base = cm
  modified_base 2: mod_base = gm
  modified_base 3: mod_base = gm
  modified_base 4: mod_base = OTHER; note = 2'-O-methyladenosine
  modified_base 5: mod_base = OTHER; note = 2'-O-methyladenosine
  modified_base 6: mod_base = um
  modified_base 7: mod_base = gm
  modified_base 8: mod_base = gm
  modified_base 9: mod_base = OTHER; note = 2'-fluoroadenosine
  modified_base 10: mod_base = OTHER; note = 2'-fluoroadenosine
  modified_base 11: mod_base = OTHER; note = 2'-fluoroadenosine
  modified_base 12: mod_base = cm
  modified_base 13: mod_base = um
  modified_base 14: mod_base = gm
  modified_base 15: mod_base = OTHER; note = 2'-O-methyladenosine
  modified_base 16: mod_base = OTHER; note = 2'-O-methyladenosine
  modified_base 17: mod_base = cm
  modified_base 18: mod_base = OTHER; note = 2'-O-methyladenosine
  modified_base 19: mod_base = cm
  modified_base 20: mod_base = OTHER; note = 2'-O-methyladenosine
  modified_base 21: mod_base = OTHER; note = 2'-O-methyladenosine
  source 1..21: mol_type = other RNA
cggaatggaaactgaacacaa

SEQ ID NO: 776 - RNA, 21 nt, synthetic construct
  modified_base 1: mod_base = cm
  modified_base 1^2: mod_base = OTHER; note = phosphorothioate linkage
  modified_base 2: mod_base = gm
  modified_base 3: mod_base = gm
  modified_base 4: mod_base = OTHER; note = 2'-O-methyladenosine
  modified_base 5: mod_base = OTHER; note = 2'-O-methyladenosine
  modified_base 6: mod_base = um
  modified_base 7: mod_base = OTHER; note = 2'-fluoroguanosine
  modified_base 8: mod_base = gm
  modified_base 9: mod_base = OTHER; note = 2'-fluoroadenosine
  modified_base 10: mod_base = OTHER; note = 2'-O-methyladenosine
  modified_base 11: mod_base = OTHER; note = 2'-fluoroadenosine
  modified_base 12: mod_base = cm
  modified_base 13: mod_base = um
  modified_base 14: mod_base = gm
  modified_base 15: mod_base = OTHER; note = 2'-O-methyladenosine
  modified_base 16: mod_base = OTHER; note = 2'-O-methyladenosine
  modified_base 17: mod_base = um
  modified_base 18: mod_base = OTHER; note = 2'-O-methyladenosine
  modified_base 19: mod_base = cm
  modified_base 20: mod_base = OTHER; note = 2'-O-methyladenosine
  modified_base 21: mod_base = OTHER; note = 2'-O-methyladenosine
  source 1..21: mol_type = other RNA
cggaatggaaactgaatacaa

SEQ ID NO: 777 - RNA, 21 nt, synthetic construct
  modified_base 1: mod_base = cm
  modified_base 1^2: mod_base = OTHER; note = phosphorothioate linkage
  modified_base 2: mod_base = gm
  modified_base 3: mod_base = gm
  modified_base 4: mod_base = OTHER; note = 2'-O-methyladenosine
  modified_base 5: mod_base = OTHER; note = 2'-O-methyladenosine
  modified_base 6: mod_base = um
  modified_base 7: mod_base = OTHER; note = 2'-fluoroguanosine
  modified_base 8: mod_base = gm
  modified_base 9: mod_base = OTHER; note = 2'-fluoroadenosine
  modified_base 10: mod_base = OTHER; note = 2'-O-methyladenosine
  modified_base 11: mod_base = OTHER; note = 2'-fluoroadenosine
  modified_base 12: mod_base = cm
  modified_base 13: mod_base = um
  modified_base 14: mod_base = gm
  modified_base 15: mod_base = OTHER; note = 2'-O-methyladenosine
  modified_base 16: mod_base = OTHER; note = 2'-O-methyladenosine
  modified_base 17: mod_base = cm
  modified_base 18: mod_base = OTHER; note = 2'-O-methyladenosine
  modified_base 19: mod_base = cm
  modified_base 20: mod_base = OTHER; note = 2'-O-methyladenosine
  modified_base 21: mod_base = OTHER; note = 2'-O-methyladenosine
  source 1..21: mol_type = other RNA
cggaatggaaactgaacacaa

SEQ ID NO: 778 - RNA, 21 nt, synthetic construct
  modified_base 1: mod_base = gm
  modified_base 1^2: mod_base = OTHER; note = phosphorothioate linkage
  modified_base 2: mod_base = gm
  modified_base 3: mod_base = gm
  modified_base 4: mod_base = OTHER; note = 2'-O-methyladenosine
  modified_base 5: mod_base = OTHER; note = 2'-O-methyladenosine
  modified_base 6: mod_base = um
  modified_base 7: mod_base = OTHER; note = 2'-fluoroguanosine
  modified_base 8: mod_base = gm
  modified_base 9: mod_base = OTHER; note = 2'-fluoroadenosine
  modified_base 10: mod_base = OTHER; note = 2'-O-methyladenosine
  modified_base 11: mod_base = OTHER; note = 2'-fluoroadenosine
  modified_base 12: mod_base = cm
  modified_base 13: mod_base = um
  modified_base 14: mod_base = gm
  modified_base 15: mod_base = OTHER; note = 2'-O-methyladenosine
  modified_base 16: mod_base = OTHER; note = 2'-O-methyladenosine
  modified_base 17: mod_base = cm
  modified_base 18: mod_base = OTHER; note = 2'-O-methyladenosine
  modified_base 19: mod_base = cm
  modified_base 20: mod_base = OTHER; note = 2'-O-methyladenosine
  modified_base 21: mod_base = OTHER; note = 2'-O-methyladenosine
  source 1..21: mol_type = other RNA
gggaatggaaactgaacacaa

SEQ ID NO: 779 - RNA, 21 nt, synthetic construct
  modified_base 1: mod_base = um
  modified_base 1^2: mod_base = OTHER; note = phosphorothioate linkage
  modified_base 2: mod_base = gm
  modified_base 3: mod_base = gm
  modified_base 4: mod_base = OTHER; note = 2'-O-methyladenosine
  modified_base 5: mod_base = OTHER; note = 2'-O-methyladenosine
  modified_base 6: mod_base = um
  modified_base 7: mod_base = OTHER; note = 2'-fluoroguanosine
  modified_base 8: mod_base = gm
  modified_base 9: mod_base = OTHER; note = 2'-fluoroadenosine
  modified_base 10: mod_base = OTHER; note = 2'-O-methyladenosine
  modified_base 11: mod_base = OTHER; note = 2'-fluoroadenosine
  modified_base 12: mod_base = cm
  modified_base 13: mod_base = um
  modified_base 14: mod_base = gm
  modified_base 15: mod_base = OTHER; note = 2'-O-methyladenosine
  modified_base 16: mod_base = OTHER; note = 2'-O-methyladenosine
  modified_base 17: mod_base = cm
  modified_base 18: mod_base = OTHER; note = 2'-O-methyladenosine
  modified_base 19: mod_base = cm
  modified_base 20: mod_base = OTHER; note = 2'-O-methyladenosine
  modified_base 21: mod_base = OTHER; note = 2'-O-methyladenosine
  source 1..21: mol_type = other RNA
tggaatggaaactgaacacaa

SEQ ID NO: 780 - RNA, 21 nt, synthetic construct
  modified_base 1: mod_base = cm
  modified_base 1^2: mod_base = OTHER; note = phosphorothioate linkage
  modified_base 2: mod_base = gm
  modified_base 3: mod_base = gm
  modified_base 4: mod_base = OTHER; note = 2'-O-methyladenosine
  modified_base 5: mod_base = OTHER; note = 2'-O-methyladenosine
  modified_base 6: mod_base = um
  modified_base 7: mod_base = OTHER; note = 2'-fluoroguanosine
  modified_base 8: mod_base = gm
  modified_base 9: mod_base = OTHER; note = 2'-fluoroadenosine
  modified_base 10: mod_base = OTHER; note = 2 -O-methyl-2-aminoadenosine
  modified_base 11: mod_base = OTHER; note = 2'-fluoroadenosine
  modified_base 12: mod_base = cm
  modified_base 13: mod_base = um
  modified_base 14: mod_base = gm
  modified_base 15: mod_base = OTHER; note = 2'-O-methyladenosine
  modified_base 16: mod_base = OTHER; note = 2'-O-methyladenosine
  modified_base 17: mod_base = cm
  modified_base 18: mod_base = OTHER; note = 2'-O-methyladenosine
  modified_base 19: mod_base = cm
  modified_base 20: mod_base = OTHER; note = 2'-O-methyladenosine
  modified_base 21: mod_base = OTHER; note = 2'-O-methyladenosine
  source 1..21: mol_type = other RNA
cggaatgganactgaacacaa

SEQ ID NO: 781 - RNA, 21 nt, synthetic construct
  modified_base 1: mod_base = cm
  modified_base 1^2: mod_base = OTHER; note = phosphorothioate linkage
  modified_base 2: mod_base = gm
  modified_base 3: mod_base = gm
  modified_base 4: mod_base = OTHER; note = 2'-O-methyladenosine
  modified_base 5: mod_base = OTHER; note = 2'-O-methyladenosine
  modified_base 6: mod_base = um
  modified_base 7: mod_base = gm
  modified_base 8: mod_base = gm
  modified_base 9: mod_base = OTHER; note = 2'-fluoroadenosine
  modified_base 10: mod_base = OTHER; note = 2'-fluoroadenosine
  modified_base 11: mod_base = OTHER; note = 2'-fluoroadenosine
  modified_base 12: mod_base = cm
  modified_base 13: mod_base = um
  modified_base 14: mod_base = gm
  modified_base 15: mod_base = OTHER; note = 2'-O-methyladenosine
  modified_base 16: mod_base = OTHER; note = 2'-O-methyladenosine
  modified_base 17: mod_base = um
  modified_base 18: mod_base = OTHER; note = 2'-O-methyladenosine
  modified_base 19: mod_base = cm
  modified_base 20: mod_base = OTHER; note = 2'-O-methyladenosine
  modified_base 21: mod_base = OTHER; note = 2'-O-methyladenosine
  source 1..21: mol_type = other RNA
cggaatggaaactgaatacaa

SEQ ID NO: 782 - RNA, 21 nt, synthetic construct
  modified_base 1: mod_base = cm
  modified_base 1^2: mod_base = OTHER; note = phosphorothioate linkage
  modified_base 2: mod_base = gm
  modified_base 3: mod_base = gm
  modified_base 4: mod_base = OTHER; note = 2'-O-methyladenosine
  modified_base 5: mod_base = OTHER; note = 2'-O-methyladenosine
  modified_base 6: mod_base = um
  modified_base 7: mod_base = gm
  modified_base 8: mod_base = gm
  modified_base 9: mod_base = OTHER; note = 2'-fluoroadenosine
  modified_base 10: mod_base = OTHER; note = 2'-fluoroadenosine
  modified_base 11: mod_base = OTHER; note = 2'-fluoroadenosine
  modified_base 12: mod_base = cm
  modified_base 13: mod_base = um
  modified_base 14: mod_base = gm
  modified_base 15: mod_base = OTHER; note = 2'-O-methyladenosine
  modified_base 16: mod_base = OTHER; note = 2'-O-methyladenosine
  modified_base 17: mod_base = cm
  modified_base 18: mod_base = OTHER; note = 2'-O-methyladenosine
  modified_base 19: mod_base = cm
  modified_base 20: mod_base = OTHER; note = 2'-O-methyladenosine
  modified_base 21: mod_base = OTHER; note = 2'-O-methyladenosine
  source 1..21: mol_type = other RNA
cggaatggaaactgaacacaa

SEQ ID NO: 783 - RNA, 21 nt, synthetic construct
  modified_base 1: mod_base = cm
  modified_base 2: mod_base = gm
  modified_base 3: mod_base = gm
  modified_base 4: mod_base = OTHER; note = 2'-O-methyladenosine
  modified_base 5: mod_base = OTHER; note = 2'-O-methyladenosine
  modified_base 6: mod_base = um
  modified_base 7: mod_base = gm
  modified_base 8: mod_base = gm
  modified_base 9: mod_base = OTHER; note = 2'-fluoroadenosine
  modified_base 10: mod_base = OTHER; note = 2'-fluoroadenosine
  modified_base 11: mod_base = OTHER; note = 2'-fluoroadenosine
  modified_base 12: mod_base = cm
  modified_base 13: mod_base = um
  modified_base 14: mod_base = gm
  modified_base 15: mod_base = OTHER; note = 2'-O-methyladenosine
  modified_base 16: mod_base = OTHER; note = 2'-O-methyladenosine
  modified_base 17: mod_base = cm
  modified_base 18: mod_base = OTHER; note = 2'-O-methyladenosine
  modified_base 19: mod_base = cm
  modified_base 20: mod_base = OTHER; note = 2'-O-methyladenosine
  modified_base 21: mod_base = OTHER; note = 2'-O-methyladenosine
  source 1..21: mol_type = other RNA
cggaatggaaactgaacacaa

SEQ ID NO: 784 - RNA, 21 nt, synthetic construct
  modified_base 1: mod_base = cm
  modified_base 1^2: mod_base = OTHER; note = phosphorothioate linkage
  modified_base 2: mod_base = gm
  modified_base 3: mod_base = gm
  modified_base 4: mod_base = OTHER; note = 2'-O-methyladenosine
  modified_base 5: mod_base = OTHER; note = 2'-O-methyladenosine
  modified_base 6: mod_base = um
  modified_base 7: mod_base = gm
  modified_base 8: mod_base = gm
  modified_base 9: mod_base = OTHER; note = 2'-fluoroadenosine
  modified_base 10: mod_base = OTHER; note = 2'-fluoroadenosine
  modified_base 11: mod_base = OTHER; note = 2'-fluoroadenosine
  modified_base 12: mod_base = cm
  modified_base 13: mod_base = um
  modified_base 14: mod_base = gm
  modified_base 15: mod_base = OTHER; note = 2'-O-methyladenosine
  modified_base 16: mod_base = OTHER; note = 2'-O-methyladenosine
  modified_base 17: mod_base = cm
  modified_base 18: mod_base = OTHER; note = 2'-O-methyladenosine
  modified_base 19: mod_base = cm
  modified_base 20: mod_base = OTHER; note = 2'-O-methyladenosine
  modified_base 21: mod_base = OTHER; note = 2'-O-methyladenosine
  source 1..21: mol_type = other RNA
cggaatggaaactgaacacaa

SEQ ID NO: 785 - RNA, 21 nt, synthetic construct
  modified_base 1: mod_base = cm
  modified_base 2: mod_base = gm
  modified_base 3: mod_base = gm
  modified_base 4: mod_base = OTHER; note = 2'-O-methyladenosine
  modified_base 5: mod_base = OTHER; note = 2'-O-methyladenosine
  modified_base 6: mod_base = um
  modified_base 7: mod_base = gm
  modified_base 8: mod_base = gm
  modified_base 9: mod_base = OTHER; note = 2'-fluoroadenosine
  modified_base 10: mod_base = OTHER; note = 2'-fluoroadenosine
  modified_base 11: mod_base = OTHER; note = 2'-fluoroadenosine
  modified_base 12: mod_base = cm
  modified_base 13: mod_base = um
  modified_base 14: mod_base = gm
  modified_base 15: mod_base = OTHER; note = 2'-O-methyladenosine
  modified_base 16: mod_base = OTHER; note = 2'-O-methyladenosine
  modified_base 17: mod_base = cm
  modified_base 18: mod_base = OTHER; note = 2'-O-methyladenosine
  modified_base 19: mod_base = cm
  modified_base 20: mod_base = OTHER; note = 2'-O-methyladenosine
  modified_base 21: mod_base = OTHER; note = 2'-O-methyladenosine
  source 1..21: mol_type = other RNA
cggaatggaaactgaacacaa

SEQ ID NO: 786 - RNA, 21 nt, synthetic construct
  modified_base 1: mod_base = cm
  modified_base 1^2: mod_base = OTHER; note = phosphorothioate linkage
  modified_base 2: mod_base = gm
  modified_base 3: mod_base = gm
  modified_base 4: mod_base = OTHER; note = 2'-O-methyladenosine
  modified_base 5: mod_base = OTHER; note = 2'-O-methyladenosine
  modified_base 6: mod_base = um
  modified_base 7: mod_base = gm
  modified_base 8: mod_base = gm
  modified_base 9: mod_base = OTHER; note = 2'-fluoroadenosine
  modified_base 10: mod_base = OTHER; note = 2'-fluoroadenosine
  modified_base 11: mod_base = OTHER; note = 2'-fluoroadenosine
  modified_base 12: mod_base = cm
  modified_base 13: mod_base = um
  modified_base 14: mod_base = gm
  modified_base 15: mod_base = OTHER; note = 2'-O-methyladenosine
  modified_base 16: mod_base = OTHER; note = 2'-O-methyladenosine
  modified_base 17: mod_base = cm
  modified_base 18: mod_base = OTHER; note = 2'-O-methyladenosine
  modified_base 19: mod_base = cm
  modified_base 20: mod_base = OTHER; note = 2'-O-methyladenosine
  modified_base 21: mod_base = OTHER; note = 2'-O-methyladenosine
  source 1..21: mol_type = other RNA
cggaatggaaactgaacacaa

SEQ ID NO: 787 - RNA, 21 nt, synthetic construct
  modified_base 1: mod_base = cm
  modified_base 2: mod_base = gm
  modified_base 3: mod_base = gm
  modified_base 4: mod_base = OTHER; note = 2'-O-methyladenosine
  modified_base 5: mod_base = OTHER; note = 2'-O-methyladenosine
  modified_base 6: mod_base = um
  modified_base 7: mod_base = gm
  modified_base 8: mod_base = gm
  modified_base 9: mod_base = OTHER; note = 2'-fluoroadenosine
  modified_base 10: mod_base = OTHER; note = 2'-fluoroadenosine
  modified_base 11: mod_base = OTHER; note = 2'-fluoroadenosine
  modified_base 12: mod_base = cm
  modified_base 13: mod_base = um
  modified_base 14: mod_base = gm
  modified_base 15: mod_base = OTHER; note = 2'-O-methyladenosine
  modified_base 16: mod_base = OTHER; note = 2'-O-methyladenosine
  modified_base 17: mod_base = cm
  modified_base 18: mod_base = OTHER; note = 2'-O-methyladenosine
  modified_base 19: mod_base = cm
  modified_base 20: mod_base = OTHER; note = 2'-O-methyladenosine
  modified_base 21: mod_base = OTHER; note = 2'-O-methyladenosine
  source 1..21: mol_type = other RNA
cggaatggaaactgaacacaa

SEQ ID NO: 788 - RNA, 21 nt, synthetic construct
  modified_base 1: mod_base = gm
  modified_base 1^2: mod_base = OTHER; note = phosphorothioate linkage
  modified_base 2: mod_base = gm
  modified_base 3: mod_base = gm
  modified_base 4: mod_base = OTHER; note = 2'-O-methyladenosine
  modified_base 5: mod_base = OTHER; note = 2'-O-methyladenosine
  modified_base 6: mod_base = um
  modified_base 7: mod_base = gm
  modified_base 8: mod_base = gm
  modified_base 9: mod_base = OTHER; note = 2'-fluoroadenosine
  modified_base 10: mod_base = OTHER; note = 2'-fluoroadenosine
  modified_base 11: mod_base = OTHER; note = 2'-fluoroadenosine
  modified_base 12: mod_base = cm
  modified_base 13: mod_base = um
  modified_base 14: mod_base = gm
  modified_base 15: mod_base = OTHER; note = 2'-O-methyladenosine
  modified_base 16: mod_base = OTHER; note = 2'-O-methyladenosine
  modified_base 17: mod_base = cm
  modified_base 18: mod_base = OTHER; note = 2'-O-methyladenosine
  modified_base 19: mod_base = cm
  modified_base 20: mod_base = OTHER; note = 2'-O-methyladenosine
  modified_base 21: mod_base = OTHER; note = 2'-O-methyladenosine
  source 1..21: mol_type = other RNA
gggaatggaaactgaacacaa

SEQ ID NO: 789 - RNA, 21 nt, synthetic construct
  modified_base 1: mod_base = cm
  modified_base 1^2: mod_base = OTHER; note = phosphorothioate linkage
  modified_base 2: mod_base = gm
  modified_base 3: mod_base = gm
  modified_base 4: mod_base = OTHER; note = 2'-O-methyladenosine
  modified_base 5: mod_base = OTHER; note = 2'-O-methyladenosine
  modified_base 6: mod_base = um
  modified_base 7: mod_base = gm
  modified_base 8: mod_base = gm
  modified_base 9: mod_base = OTHER; note = 2'-fluoroadenosine
  modified_base 10: mod_base = OTHER; note = 2'-fluoroadenosine
  modified_base 11: mod_base = OTHER; note = 2'-fluoroadenosine
  modified_base 12: mod_base = cm
  modified_base 13: mod_base = um
  modified_base 14: mod_base = OTHER; note = 2 -O-methylinosine
  modified_base 15: mod_base = OTHER; note = 2'-O-methyladenosine
  modified_base 16: mod_base = OTHER; note = 2'-O-methyladenosine
  modified_base 17: mod_base = cm
  modified_base 18: mod_base = OTHER; note = 2'-O-methyladenosine
  modified_base 19: mod_base = cm
  modified_base 20: mod_base = OTHER; note = 2'-O-methyladenosine
  modified_base 21: mod_base = OTHER; note = 2'-O-methyladenosine
  source 1..21: mol_type = other RNA
cggaatggaaactnaacacaa

SEQ ID NO: 790 - RNA, 21 nt, synthetic construct
  modified_base 1: mod_base = cm
  modified_base 1^2: mod_base = OTHER; note = phosphorothioate linkage
  modified_base 2: mod_base = gm
  modified_base 3: mod_base = gm
  modified_base 4: mod_base = OTHER; note = 2'-O-methyladenosine
  modified_base 5: mod_base = OTHER; note = 2'-O-methyladenosine
  modified_base 6: mod_base = um
  modified_base 7: mod_base = gm
  modified_base 8: mod_base = gm
  modified_base 9: mod_base = OTHER; note = 2'-fluoroadenosine
  modified_base 10: mod_base = OTHER; note = 2 -O-methyl-2-aminoadenosine
  modified_base 11: mod_base = OTHER; note = 2'-fluoroadenosine
  modified_base 12: mod_base = cm
  modified_base 13: mod_base = um
  modified_base 14: mod_base = OTHER; note = 2 -O-methylinosine
  modified_base 15: mod_base = OTHER; note = 2'-O-methyladenosine
  modified_base 16: mod_base = OTHER; note = 2'-O-methyladenosine
  modified_base 17: mod_base = cm
  modified_base 18: mod_base = OTHER; note = 2'-O-methyladenosine
  modified_base 19: mod_base = cm
  modified_base 20: mod_base = OTHER; note = 2'-O-methyladenosine
  modified_base 21: mod_base = OTHER; note = 2'-O-methyladenosine
  source 1..21: mol_type = other RNA
cggaatgganactnaacacaa

SEQ ID NO: 791 - RNA, 21 nt, synthetic construct
  modified_base 1: mod_base = gm
  modified_base 1^2: mod_base = OTHER; note = phosphorothioate linkage
  modified_base 2: mod_base = gm
  modified_base 3: mod_base = OTHER; note = 2'-O-methyladenosine
  modified_base 4: mod_base = OTHER; note = 2'-O-methyladenosine
  modified_base 5: mod_base = um
  modified_base 6: mod_base = gm
  modified_base 7: mod_base = gm
  modified_base 8: mod_base = OTHER; note = 2'-O-methyladenosine
  modified_base 9: mod_base = OTHER; note = 2'-fluoroadenosine
  modified_base 10: mod_base = OTHER; note = 2'-fluoroadenosine
  modified_base 11: mod_base = OTHER; note = 2'-fluorocytidine
  modified_base 12: mod_base = um
  modified_base 13: mod_base = gm
  modified_base 14: mod_base = OTHER; note = 2'-O-methyladenosine
  modified_base 15: mod_base = OTHER; note = 2'-O-methyladenosine
  modified_base 16: mod_base = cm
  modified_base 17: mod_base = OTHER; note = 2'-O-methyladenosine
  modified_base 18: mod_base = cm
  modified_base 19: mod_base = OTHER; note = 2'-O-methyladenosine
  modified_base 20: mod_base = OTHER; note = 2 -O-methylinosine
  modified_base 21: mod_base = OTHER; note = 2'-O-methyladenosine
  source 1..21: mol_type = other RNA
ggaatggaaactgaacacana

SEQ ID NO: 792 - RNA, 21 nt, synthetic construct
  modified_base 1: mod_base = OTHER; note = 2'-O-methyladenosine
  modified_base 1^2: mod_base = OTHER; note = phosphorothioate linkage
  modified_base 2: mod_base = cm
  modified_base 3: mod_base = cm
  modified_base 4: mod_base = OTHER; note = 2'-O-methyladenosine
  modified_base 5: mod_base = gm
  modified_base 6: mod_base = OTHER; note = 2'-O-methyladenosine
  modified_base 7: mod_base = um
  modified_base 8: mod_base = um
  modified_base 9: mod_base = OTHER; note = 2'-fluorocytidine
  modified_base 10: mod_base = OTHER; note = 2'-fluorocytidine
  modified_base 11: mod_base = OTHER; note = 2'-fluorouridine
  modified_base 12: mod_base = gm
  modified_base 13: mod_base = gm
  modified_base 14: mod_base = gm
  modified_base 15: mod_base = OTHER; note = 2'-O-methyladenosine
  modified_base 16: mod_base = OTHER; note = 2'-O-methyladenosine
  modified_base 17: mod_base = OTHER; note = 2 -O-methylinosine
  modified_base 18: mod_base = cm
  modified_base 19: mod_base = cm
  modified_base 20: mod_base = OTHER; note = 2'-O-methyladenosine
  modified_base 21: mod_base = OTHER; note = 2'-O-methyladenosine
  source 1..21: mol_type = other RNA
accagattcctgggaanccaa

SEQ ID NO: 793 - RNA, 21 nt, synthetic construct
  modified_base 1: mod_base = um
  modified_base 1^2: mod_base = OTHER; note = phosphorothioate linkage
  modified_base 2: mod_base = cm
  modified_base 3: mod_base = cm
  modified_base 4: mod_base = um
  modified_base 5: mod_base = gm
  modified_base 6: mod_base = gm
  modified_base 7: mod_base = gm
  modified_base 8: mod_base = OTHER; note = 2'-O-methyladenosine
  modified_base 9: mod_base = OTHER; note = 2'-fluoroadenosine
  modified_base 10: mod_base = OTHER; note = 2'-fluoroguanosine
  modified_base 11: mod_base = OTHER; note = 2'-fluorocytidine
  modified_base 12: mod_base = cm
  modified_base 13: mod_base = OTHER; note = 2'-O-methyladenosine
  modified_base 14: mod_base = gm
  modified_base 15: mod_base = OTHER; note = 2'-O-methyladenosine
  modified_base 16: mod_base = OTHER; note = 2'-O-methyladenosine
  modified_base 17: mod_base = OTHER; note = 2'-O-methyladenosine
  modified_base 18: mod_base = um
  modified_base 19: mod_base = um
  modified_base 20: mod_base = gm
  modified_base 21: mod_base = um
  source 1..21: mol_type = other RNA
tcctgggaagccagaaattgt

SEQ ID NO: 794 - RNA, 21 nt, synthetic construct
  modified_base 1: mod_base = gm
  modified_base 1^2: mod_base = OTHER; note = phosphorothioate linkage
  modified_base 2: mod_base = OTHER; note = 2'-O-methyladenosine
  modified_base 3: mod_base = gm
  modified_base 4: mod_base = um
  modified_base 5: mod_base = OTHER; note = 2'-O-methyladenosine
  modified_base 6: mod_base = gm
  modified_base 7: mod_base = OTHER; note = 2'-fluoroguanosine
  modified_base 8: mod_base = um
  modified_base 9: mod_base = OTHER; note = 2'-fluoroguanosine
  modified_base 10: mod_base = cm
  modified_base 11: mod_base = OTHER; note = 2'-fluorouridine
  modified_base 12: mod_base = cm
  modified_base 13: mod_base = OTHER; note = 2'-O-methyladenosine
  modified_base 14: mod_base = OTHER; note = 2'-O-methyladenosine
  modified_base 15: mod_base = OTHER; note = 2'-O-methyladenosine
  modified_base 16: mod_base = OTHER; note = 2'-O-methyladenosine
  modified_base 17: mod_base = cm
  modified_base 18: mod_base = OTHER; note = 2'-O-methyladenosine
  modified_base 19: mod_base = um
  modified_base 20: mod_base = cm
  modified_base 21: mod_base = OTHER; note = 2'-O-methyladenosine
  source 1..21: mol_type = other RNA
gagtaggtgctcaaaacatca

SEQ ID NO: 795 - RNA, 21 nt, synthetic construct
  modified_base 1: mod_base = OTHER; note = 2'-O-methyladenosine
  modified_base 1^2: mod_base = OTHER; note = phosphorothioate linkage
  modified_base 2: mod_base = gm
  modified_base 3: mod_base = gm
  modified_base 4: mod_base = cm
  modified_base 5: mod_base = OTHER; note = 2'-O-methyladenosine
  modified_base 6: mod_base = OTHER; note = 2'-O-methyladenosine
  modified_base 7: mod_base = um
  modified_base 8: mod_base = gm
  modified_base 9: mod_base = OTHER; note = 2'-fluoroadenosine
  modified_base 10: mod_base = OTHER; note = 2'-fluoroadenosine
  modified_base 11: mod_base = OTHER; note = 2'-fluorocytidine
  modified_base 12: mod_base = OTHER; note = 2'-O-methyladenosine
  modified_base 13: mod_base = gm
  modified_base 14: mod_base = gm
  modified_base 15: mod_base = OTHER; note = 2'-O-methyladenosine
  modified_base 16: mod_base = OTHER; note = 2'-O-methyladenosine
  modified_base 17: mod_base = um
  modified_base 18: mod_base = OTHER; note = 2 -O-methylinosine
  modified_base 19: mod_base = gm
  modified_base 20: mod_base = OTHER; note = 2'-O-methyladenosine
  modified_base 21: mod_base = OTHER; note = 2'-O-methyladenosine
  source 1..21: mol_type = other RNA
aggcaatgaacaggaatngaa

SEQ ID NO: 796 - RNA, 21 nt, synthetic construct
  modified_base 1: mod_base = cm
  modified_base 1^2: mod_base = OTHER; note = phosphorothioate linkage
  modified_base 2: mod_base = gm
  modified_base 3: mod_base = gm
  modified_base 4: mod_base = OTHER; note = 2'-O-methyladenosine
  modified_base 5: mod_base = OTHER; note = 2'-O-methyladenosine
  modified_base 6: mod_base = um
  modified_base 7: mod_base = gm
  modified_base 8: mod_base = gm
  modified_base 9: mod_base = OTHER; note = 2'-fluoroadenosine
  modified_base 10: mod_base = OTHER; note = 2'-O-methyladenosine
  modified_base 11: mod_base = OTHER; note = 2'-fluoroadenosine
  modified_base 12: mod_base = cm
  modified_base 13: mod_base = OTHER; note = 2'-fluorouridine
  modified_base 14: mod_base = gm
  modified_base 15: mod_base = OTHER; note = 2'-O-methyladenosine
  modified_base 16: mod_base = OTHER; note = 2'-O-methyladenosine
  modified_base 17: mod_base = cm
  modified_base 18: mod_base = OTHER; note = 2'-O-methyladenosine
  modified_base 19: mod_base = cm
  modified_base 20: mod_base = OTHER; note = 2'-O-methyladenosine
  modified_base 21: mod_base = OTHER; note = 2'-O-methyladenosine
  source 1..21: mol_type = other RNA
cggaatggaaactgaacacaa

SEQ ID NO: 797 - RNA, 21 nt, synthetic construct
  modified_base 1: mod_base = gm
  modified_base 1^2: mod_base = OTHER; note = phosphorothioate linkage
  modified_base 2: mod_base = OTHER; note = 2'-O-methyladenosine
  modified_base 3: mod_base = gm
  modified_base 4: mod_base = um
  modified_base 5: mod_base = OTHER; note = 2'-O-methyladenosine
  modified_base 6: mod_base = gm
  modified_base 7: mod_base = OTHER; note = 2'-fluoroguanosine
  modified_base 8: mod_base = um
  modified_base 9: mod_base = OTHER; note = 2'-fluoroguanosine
  modified_base 10: mod_base = cm
  modified_base 11: mod_base = OTHER; note = 2'-fluorouridine
  modified_base 12: mod_base = cm
  modified_base 13: mod_base = OTHER; note = 2'-O-methyladenosine
  modified_base 14: mod_base = OTHER; note = 2'-O-methyladenosine
  modified_base 15: mod_base = OTHER; note = 2'-O-methyladenosine
  modified_base 16: mod_base = OTHER; note = 2'-O-methyladenosine
  modified_base 17: mod_base = cm
  modified_base 18: mod_base = OTHER; note = 2'-O-methyladenosine
  modified_base 19: mod_base = um
  modified_base 20: mod_base = cm
  modified_base 21: mod_base = OTHER; note = 2'-O-methyladenosine
  source 1..21: mol_type = other RNA
gagtaggtgctcaaaacatca

SEQ ID NO: 798 - RNA, 21 nt, synthetic construct
  modified_base 1: mod_base = cm
  modified_base 1^2: mod_base = OTHER; note = phosphorothioate linkage
  modified_base 2: mod_base = cm
  modified_base 3: mod_base = um
  modified_base 4: mod_base = gm
  modified_base 5: mod_base = gm
  modified_base 6: mod_base = gm
  modified_base 7: mod_base = OTHER; note = 2'-O-methyladenosine
  modified_base 8: mod_base = OTHER; note = 2'-O-methyladenosine
  modified_base 9: mod_base = OTHER; note = 2'-fluoroguanosine
  modified_base 10: mod_base = OTHER; note = 2'-fluorocytidine
  modified_base 11: mod_base = OTHER; note = 2'-fluorocytidine
  modified_base 12: mod_base = OTHER; note = 2'-O-methyladenosine
  modified_base 13: mod_base = gm
  modified_base 14: mod_base = OTHER; note = 2'-O-methyladenosine
  modified_base 15: mod_base = OTHER; note = 2'-O-methyladenosine
  modified_base 16: mod_base = OTHER; note = 2'-O-methyladenosine
  modified_base 17: mod_base = um
  modified_base 18: mod_base = um
  modified_base 19: mod_base = gm
  modified_base 20: mod_base = um
  modified_base 21: mod_base = OTHER; note = 2'-O-methyladenosine
  source 1..21: mol_type = other RNA
cctgggaagccagaaattgta

SEQ ID NO: 799 - RNA, 21 nt, synthetic construct
  modified_base 1: mod_base = cm
  modified_base 1^2: mod_base = OTHER; note = phosphorothioate linkage
  modified_base 2: mod_base = gm
  modified_base 3: mod_base = gm
  modified_base 4: mod_base = OTHER; note = 2'-O-methyladenosine
  modified_base 5: mod_base = OTHER; note = 2'-O-methyladenosine
  modified_base 6: mod_base = um
  modified_base 7: mod_base = gm
  modified_base 8: mod_base = gm
  modified_base 9: mod_base = OTHER; note = 2'-fluoroadenosine
  modified_base 10: mod_base = OTHER; note = 2'-fluoroadenosine
  modified_base 11: mod_base = OTHER; note = 2'-fluoroadenosine
  modified_base 12: mod_base = cm
  modified_base 13: mod_base = um
  modified_base 14: mod_base = gm
  modified_base 15: mod_base = OTHER; note = 2'-O-methyladenosine
  modified_base 16: mod_base = OTHER; note = 2'-O-methyladenosine
  modified_base 17: mod_base = cm
  modified_base 18: mod_base = OTHER; note = 2'-O-methyladenosine
  modified_base 19: mod_base = cm
  modified_base 20: mod_base = OTHER; note = 2'-O-methyladenosine
  modified_base 21: mod_base = OTHER; note = 2'-O-methyladenosine
  source 1..21: mol_type = other RNA
cggaatggaaactgaacacaa

SEQ ID NO: 800 - RNA, 21 nt, synthetic construct
  source 1..21: mol_type = other RNA
ttgtgttcagtttccattccg

SEQ ID NO: 801 - RNA, 21 nt, synthetic construct
  source 1..21: mol_type = other RNA
tctgtgttcagtttccattcc

SEQ ID NO: 802 - RNA, 21 nt, synthetic construct
  source 1..21: mol_type = other RNA
ttggcttcccaggaatctggt

SEQ ID NO: 803 - RNA, 21 nt, synthetic construct
  source 1..21: mol_type = other RNA
acaatttctggcttcccagga

SEQ ID NO: 804 - RNA, 21 nt, synthetic construct
  source 1..21: mol_type = other RNA
ttacacttcagcaccagtggc

SEQ ID NO: 805 - RNA, 21 nt, synthetic construct
  source 1..21: mol_type = other RNA
taccttccaagcttctgtccg

SEQ ID NO: 806 - RNA, 21 nt, synthetic construct
  source 1..21: mol_type = other RNA
tcggaaaatcccctcatcctg

SEQ ID NO: 807 - RNA, 21 nt, synthetic construct
  source 1..21: mol_type = other RNA
tttctggcttcccaggaatct

SEQ ID NO: 808 - RNA, 21 nt, synthetic construct
  source 1..21: mol_type = other RNA
ttgagttcagaggcagaatct

SEQ ID NO: 809 - RNA, 21 nt, synthetic construct
  source 1..21: mol_type = other RNA
tctaagagtccctgcagggta

SEQ ID NO: 810 - RNA, 21 nt, synthetic construct
  source 1..21: mol_type = other RNA
agctaagagtccctgcagggt

SEQ ID NO: 811 - RNA, 21 nt, synthetic construct
  source 1..21: mol_type = other RNA
aagctacaggagaaggtggga

SEQ ID NO: 812 - RNA, 21 nt, synthetic construct
  source 1..21: mol_type = other RNA
tctgaagctacaggagaaggt

SEQ ID NO: 813 - RNA, 21 nt, synthetic construct
  source 1..21: mol_type = other RNA
tacagactgaggaccagcacc

SEQ ID NO: 814 - RNA, 21 nt, synthetic construct
  source 1..21: mol_type = other RNA
tcacagactgaggaccagcac

SEQ ID NO: 815 - RNA, 21 nt, synthetic construct
  source 1..21: mol_type = other RNA
ttgtgttcagtttccattccc

SEQ ID NO: 816 - RNA, 21 nt, synthetic construct
  source 1..21: mol_type = other RNA
tgatgttttgagcacctactc

SEQ ID NO: 817 - RNA, 21 nt, synthetic construct
  source 1..21: mol_type = other RNA
ttccattcctgttcattgcct

SEQ ID NO: 818 - RNA, 21 nt, synthetic construct
  source 1..21: mol_type = other RNA
tgaatctggtagacacggact

SEQ ID NO: 819 - RNA, 21 nt, synthetic construct
  source 1..21: mol_type = other RNA
taggaatctggtagacacgga

SEQ ID NO: 820 - RNA, 21 nt, synthetic construct
  source 1..21: mol_type = other RNA
taagctacaggagaaggtggg

SEQ ID NO: 821 - RNA, 21 nt, synthetic construct
  source 1..21: mol_type = other RNA
tcatccagtggatttgaggag

SEQ ID NO: 822 - RNA, 21 nt, synthetic construct
  source 1..21: mol_type = other RNA
agttcagaggcagaatctacc

SEQ ID NO: 823 - RNA, 21 nt, synthetic construct
  source 1..21: mol_type = other RNA
tgagttcagaggcagaatcta

SEQ ID NO: 824 - RNA, 21 nt, synthetic construct
  source 1..21: mol_type = other RNA
accttattgggaacaccagcc

SEQ ID NO: 825 - RNA, 21 nt, synthetic construct
  source 1..21: mol_type = other RNA
tcaccttattgggaacaccag

SEQ ID NO: 826 - RNA, 21 nt, synthetic construct
  source 1..21: mol_type = other RNA
tcatccaagtgccagctaagc

SEQ ID NO: 827 - RNA, 21 nt, synthetic construct
  source 1..21: mol_type = other RNA
agatactcccttctcattagg

SEQ ID NO: 828 - RNA, 21 nt, synthetic construct
  source 1..21: mol_type = other RNA
tcacagatactcccttctcac

SEQ ID NO: 829 - RNA, 21 nt, synthetic construct
  source 1..21: mol_type = other RNA
tgttcgatgatgctgatgctg

SEQ ID NO: 830 - RNA, 21 nt, synthetic construct
  source 1..21: mol_type = other RNA
ttgtgttcagtttccattcca

SEQ ID NO: 831 - RNA, 21 nt, synthetic construct
  source 1..21: mol_type = other RNA
tcctttccattcctgttcatc

SEQ ID NO: 832 - RNA, 21 nt, synthetic construct
  source 1..21: mol_type = other RNA
ttagacacggactcggtagtc

SEQ ID NO: 833 - RNA, 21 nt, synthetic construct
  source 1..21: mol_type = other RNA
atactcccttctcattaggca

SEQ ID NO: 834 - RNA, 21 nt, synthetic construct
  source 1..21: mol_type = other RNA
ttccattcctgttcattgccc

SEQ ID NO: 835 - RNA, 21 nt, synthetic construct
  source 1..21: mol_type = other RNA
tgatgttttgagcacctactg

SEQ ID NO: 836 - RNA, 21 nt, synthetic construct
  source 1..21: mol_type = other RNA
tgatgttttgagcacctacta

SEQ ID NO: 837 - RNA, 21 nt, synthetic construct
  source 1..21: mol_type = other RNA
tacaatttctggcttcccagg

SEQ ID NO: 838 - RNA, 21 nt, synthetic construct
  source 1..21: mol_type = other RNA
cggaatggaaactgaacacaa

SEQ ID NO: 839 - RNA, 21 nt, synthetic construct
  modified_base 20: mod_base = i
  source 1..21: mol_type = other RNA
ggaatggaaactgaacacana

SEQ ID NO: 840 - RNA, 21 nt, synthetic construct
  modified_base 17: mod_base = i
  source 1..21: mol_type = other RNA
accagattcctgggaanccaa

SEQ ID NO: 841 - RNA, 21 nt, synthetic construct
  source 1..21: mol_type = other RNA
tcctgggaagccagaaattgt

SEQ ID NO: 842 - RNA, 21 nt, synthetic construct
  source 1..21: mol_type = other RNA
gccactggtgctgaagtgtaa

SEQ ID NO: 843 - RNA, 21 nt, synthetic construct
  modified_base 19: mod_base = i
  source 1..21: mol_type = other RNA
cggacagaagcttggaagnta

SEQ ID NO: 844 - RNA, 21 nt, synthetic construct
  modified_base 20: mod_base = i
  source 1..21: mol_type = other RNA
caggatgaggggattttccna

SEQ ID NO: 845 - RNA, 21 nt, synthetic construct
  source 1..21: mol_type = other RNA
agattcctgggaagctagaaa

SEQ ID NO: 846 - RNA, 21 nt, synthetic construct
  modified_base 1: mod_base = OTHER; note = 2-aminoadenine
  source 1..21: mol_type = other RNA
ngattctgcctctgaactcaa

SEQ ID NO: 847 - RNA, 21 nt, synthetic construct
  source 1..21: mol_type = other RNA
taccctgcagggactcttaga

SEQ ID NO: 848 - RNA, 21 nt, synthetic construct
  modified_base 19: mod_base = i
  source 1..21: mol_type = other RNA
accctgcagggactcttanct

SEQ ID NO: 849 - RNA, 21 nt, synthetic construct
  modified_base 18: mod_base = i
  source 1..21: mol_type = other RNA
tcccaccttctcctgtanctt

SEQ ID NO: 850 - RNA, 21 nt, synthetic construct
  modified_base 20: mod_base = i
  source 1..21: mol_type = other RNA
accttctcctgtagcttcana

SEQ ID NO: 851 - RNA, 21 nt, synthetic construct
  modified_base 19: mod_base = i
  source 1..21: mol_type = other RNA
ggtgctggtcctcagtctnta

SEQ ID NO: 852 - RNA, 21 nt, synthetic construct
  source 1..21: mol_type = other RNA
ggtgctggtcctcagtctgta

SEQ ID NO: 853 - RNA, 21 nt, synthetic construct
  modified_base 20: mod_base = i
  source 1..21: mol_type = other RNA
gtgctggtcctcagtctgtna

SEQ ID NO: 854 - RNA, 21 nt, synthetic construct
  modified_base 18: mod_base = i
  source 1..21: mol_type = other RNA
gtgctggtcctcagtctntga

SEQ ID NO: 855 - RNA, 21 nt, synthetic construct
  source 1..21: mol_type = other RNA
gggaatggaaactgaacacaa

SEQ ID NO: 856 - RNA, 21 nt, synthetic construct
  modified_base 14: mod_base = i
  source 1..21: mol_type = other RNA
cggaatggaaactnaacacaa

SEQ ID NO: 857 - RNA, 21 nt, synthetic construct
  modified_base 10: mod_base = OTHER; note = 2-aminoadenine
  modified_base 14: mod_base = i
  source 1..21: mol_type = other RNA
cggaatgganactnaacacaa

SEQ ID NO: 858 - RNA, 21 nt, synthetic construct
  source 1..21: mol_type = other RNA
cggaatggaaactgaatacaa

SEQ ID NO: 859 - RNA, 21 nt, synthetic construct
  source 1..21: mol_type = other RNA
gagtaggtgctcaaaacatca

SEQ ID NO: 860 - RNA, 21 nt, synthetic construct
  modified_base 18: mod_base = i
  source 1..21: mol_type = other RNA
aggcaatgaacaggaatngaa

SEQ ID NO: 861 - RNA, 21 nt, synthetic construct
  modified_base 16: mod_base = i
  source 1..21: mol_type = other RNA
agtccgtgtctaccanattca

SEQ ID NO: 862 - RNA, 21 nt, synthetic construct
  source 1..21: mol_type = other RNA
tccgtgtctaccagattccta

SEQ ID NO: 863 - RNA, 21 nt, synthetic construct
  modified_base 17: mod_base = i
  source 1..21: mol_type = other RNA
cccaccttctcctgtanctta

SEQ ID NO: 864 - RNA, 21 nt, synthetic construct
  modified_base 16: mod_base = i
  source 1..21: mol_type = other RNA
ctcctcaaatccactngatga

SEQ ID NO: 865 - RNA, 21 nt, synthetic construct
  modified_base 17: mod_base = i
  source 1..21: mol_type = other RNA
ggtagattctgcctctnaact

SEQ ID NO: 866 - RNA, 21 nt, synthetic construct
  source 1..21: mol_type = other RNA
tagattctgcctctgaactca

SEQ ID NO: 867 - RNA, 21 nt, synthetic construct
  source 1..21: mol_type = other RNA
ggctggtgttcccaataaggt

SEQ ID NO: 868 - RNA, 21 nt, synthetic construct
  modified_base 18: mod_base = i
  source 1..21: mol_type = other RNA
ctggtgttcccaataagntga

SEQ ID NO: 869 - RNA, 21 nt, synthetic construct
  modified_base 16: mod_base = i
  source 1..21: mol_type = other RNA
gcttagctggcacttngatga

SEQ ID NO: 870 - RNA, 21 nt, synthetic construct
  modified_base 16: mod_base = i
  source 1..21: mol_type = other RNA
cctaatgagaagggantatct

SEQ ID NO: 871 - RNA, 21 nt, synthetic construct
  modified_base 18: mod_base = i
  source 1..21: mol_type = other RNA
gtgagaagggagtatctntga

SEQ ID NO: 872 - RNA, 21 nt, synthetic construct
  modified_base 17: mod_base = i
  source 1..21: mol_type = other RNA
cagcatcagcatcatcnaaca

SEQ ID NO: 873 - RNA, 21 nt, synthetic construct
  source 1..21: mol_type = other RNA
tggaatggaaactgaacacaa

SEQ ID NO: 874 - RNA, 21 nt, synthetic construct
  modified_base 10: mod_base = OTHER; note = 2-aminoadenine
  source 1..21: mol_type = other RNA
cggaatgganactgaacacaa

SEQ ID NO: 875 - RNA, 21 nt, synthetic construct
  source 1..21: mol_type = other RNA
gatgaacaggaatggaaagga

SEQ ID NO: 876 - RNA, 21 nt, synthetic construct
  modified_base 20: mod_base = i
  source 1..21: mol_type = other RNA
gatgaacaggaatggaaagna

SEQ ID NO: 877 - RNA, 21 nt, synthetic construct
  source 1..21: mol_type = other RNA
gactaccgagtccgtgtctaa

SEQ ID NO: 878 - RNA, 21 nt, synthetic construct
  source 1..21: mol_type = other RNA
tgcctaatgagaagggagtat

SEQ ID NO: 879 - RNA, 21 nt, synthetic construct
  modified_base 7: mod_base = i
  source 1..21: mol_type = other RNA
gagtagntgctcaaaacatca

SEQ ID NO: 880 - RNA, 21 nt, synthetic construct
  source 1..21: mol_type = other RNA
aggcaatgaacaggaatggaa

SEQ ID NO: 881 - RNA, 21 nt, synthetic construct
  modified_base 19: mod_base = i
  source 1..21: mol_type = other RNA
aggcaatgaacaggaatgnaa

SEQ ID NO: 882 - RNA, 21 nt, synthetic construct
  modified_base 14: mod_base = i
  source 1..21: mol_type = other RNA
aggcaatgaacagnaatggaa

SEQ ID NO: 883 - RNA, 21 nt, synthetic construct
  modified_base 13: mod_base = i
  source 1..21: mol_type = other RNA
aggcaatgaacangaatggaa

SEQ ID NO: 884 - RNA, 21 nt, synthetic construct
  modified_base 18: mod_base = i
  source 1..21: mol_type = other RNA
gggcaatgaacaggaatngaa

SEQ ID NO: 885 - RNA, 21 nt, synthetic construct
  source 1..21: mol_type = other RNA
cagtaggtgctcaaaacatca

SEQ ID NO: 886 - RNA, 21 nt, synthetic construct
  modified_base 2: mod_base = OTHER; note = 2-aminoadenine
  source 1..21: mol_type = other RNA
tngtaggtgctcaaaacatca

SEQ ID NO: 887 - RNA, 21 nt, synthetic construct
  source 1..21: mol_type = other RNA
cctgggaagccagaaattgta

SEQ ID NO: 888 - RNA, 21 nt, synthetic construct
  modified_base 17: mod_base = i
  source 1..21: mol_type = other RNA
ccacatgatccatgctnagta

SEQ ID NO: 889 - RNA, 21 nt, synthetic construct
  source 1..21: mol_type = other RNA
tactcagcatggatcatgtgg

SEQ ID NO: 890 - RNA, 21 nt, synthetic construct
  modified_base 17: mod_base = i
  source 1..21: mol_type = other RNA
ccacatgatccatgctnagta

SEQ ID NO: 891 - RNA, 21 nt, synthetic construct
  source 1..21: mol_type = other RNA
tactcagcatggatcatgtgg
